United States Patent Application Publication US 2004/0072154 A1 - sequence listing, part 2

SEQ ID NO: 142 - DNA, 52661 bp, Homo sapiens
aatacatagaaaattgtgattggaataagggctctgagggggtttatgcagtcctgtgagagtgtggggaattttctgatctgatacaaccctgagaggttcttcattttgagagcacaagctttgttttataacaggcttcaaaacagatcttctctaccagctggataaccctgggcaattttctctctaagcatcatcgccctcacttgtaaaatcgagaggatgtgtctttcaaagagtatggagatgacattcaatatagtggatataaaagtttgtaccacagttagacctactgatgtaagcatgcaggttagcaagatctcactttcctttgctcaggaggatctccaggcccagggacaacatggcctagtgggaagcctgacacacacataaggacaaatcagagggattcccagttgattttcaggagaagggttacctctgacttcctgaagggaaatggttacagaggtgtttggatggaatgatattagagttaagggtagaaaaatggtggaagtggtgctggctttgcattgaagagggaagcacatggatgcttcccaacatcacacagctggggaggactttcttctccccatgagcacctaaggaccacaagaaactggagacagatgcccagtgctggagacagtcacattgtttcaggatcttccttggatcaaatccagacagttgttccttatatcagtcaggtcctggcaggaaacaggtccatattcaacagtagtgactggagagaattaatgaaataactatgtacagagatgtgagcagggttaattgtgaacatcccagggccagctacagctataaaccacggtaagatcacccctatagtcttaaagctgcagggtgagggagtgaggttgctggaacctagcagaagcatttcccttggaaagggggccagccagcaaaagctaaggctgcatggagagaaacctggccactgccaaccaggccttggtggcagggagccaggggaattcatattttgacccctctcctgatccttccatattctgctggtgcctctcattggccaagcccaagcaggaaccagagggcaagagagcaccttaaggtagcacataaagcctcctagaacacagtgcaggaaagagaaagatctgaaaagtaaatagggaatattcagtacatccccttgcaaaatgacatctgattgttttttgtaccagcagtaccaggctctgttccaagcacggtacatttacatgtattgtctcatttagttttcctgataaattaaagtatgtgcatttctatttgagtgcatgtgcacgtgcatatactctgcagggctttagcaacacagcaaagatgccatagccccgttggtgtctttttcggctaagccaacccactgctgtagagagttgaattattttggtagttgttaatattgcagcattttaaaaagctggggtagaaaatagtactcattagtgtgcagcgtgctcagctccaggctgttgacaggcatgagaagaaggctgagctgctgcctttcctgcagttctcagttctgctctgtcactgcctgtgtgggtggtgtgtgacaggaggcaagtggtgggctccctgagagcaggattagggtgcaaagcccttagcagagcccacaggccacagagccaggggagtatttctactgtaaccaacgacagggtagttggcagaggagccctgcctggttctgcctcatacttgggaagcttacaaaatcataaacatccttatgcaccttagcctgtggttttacacttcgggatgcataaaagtcatgtgggaaagctcgttaaaaaggcagattccgcctgggcgcagtggctcatgcctgtaatcccagcactttgggaggccaaggcaggcagatcatgaggtcaagagatgaagaccatcctggccaacatggtgaaacctcatctctactaaaaatgcaagaattagctgggcatggtggcgcgcctgtagtcccagctactcgggaggctgaggcaggagaattgcctgaactgggaggcggaggttgcagtgagccgagatcacgccactgcactccagcctggtgacagagcaagactccgtctaaaaaaaaaatggcagcttccagggccccacctccaggattccactgaagcaaggctgtcaaaaactcaggaatcttcctctaacatgcctccatggctgtgatgcaggtggtctgtggacctcacatgtatcaatactttggggtgggtgtgtgtttttagagctgggagagacagtatgcttcttaggtgaccaagtccattatctgaagttgatgtaccgtgattgaacaatgccgaaaagaggtgccaatctgtagcttcaggaatgggagcaagaatgcgtgaatcttggttaaagagcaagccgagcttgatcagaggaagcagcacacagaaaacgcactggaggacggcaccagcagagatgtcctgtatgggaggatgttattttcagggaggctgctcctcctgctaaagccctgcccccaccacctgccttcaggattgtaggagggaaaggcttggacaaactgtgtgaactggcaaagtgctctagaattggccaccttgcttccctaaaggatgtgtcaccaaatccctcaatgccgtgtcctccaagagaactggcagggctcaaactagggaactttggcttatgcccaagccctgtcacccaatatttctgtaactttggacatcactgtacctctcaaagcctctatttccaaactgataaaatggaaataagaaagccaactttactaccatcaccaatgcaaagatgaactgagatctgttaaatccctgcacatggaaaagaataaatatttattgagtgctggattgtgtggtttatatacatcgtgccaaatgctacacaaatgaaaggggctgttatttattttataaactttaggtttacccacttaaaaacccaatttcaaattagaaaatttggcttaaaatgacatcacttaagcactttctgattaaattgttttctttcttttcccccgtttgtaaccaaatctctccaatgaacctcctcctgcgcttttttttaaccatggtctctagcgagtcatgagctcagaggttgtaaccagtatcctgaactctgttcctccacttatgagcatataatacatttactaaagcaatatttccagcacctacacatacatctctgtgcttcattcatcctcacagaccccagaacactaattaggcacttgggccctgaagcttccttctgtgagtgtctcagagctaacttggcttagcagcaccccatccccatccccatccctactctcaccccaagacacagtcctggttcccaagctcgcaagttcccaagcttcttctccaccacgatagctcctccatctgcctactgttcccaagcctcctgaattctctaccctcactctgcctttagtgctcagccctgttatcctgacacctctccctgcaaactcactctcaggaacctctgcgattgacattcatccacatattaatggaactccagagagtggtggagccatattcccccagctttactcattcccaaacccctccagtcatcatctgcacaagaacactcttctgccctgcggagtcctggggctgttcattacactaatatgcatgattgttccctcaactccagcttctagtgttaccctgaggtcagactaacaacgtacatttgtttcaagctttacacttgacaaagtctttgcaagaccactatttgatatgactgtcacaataatctcgtggtaagtggctggtgttgtgattatcctccattttacagatgataaaacaaaggttatgggttttgtctgattcagtggttctcaaccagagatgatttttccctccaggagacatttagcaatgtctggaacatttttgattgtcacagtggtggaagagaagatgctactggcatctagtggatagaggccagggatgctgtccaacatcctataatacacagggcagccagcctccacaacaaaaaactatctgacccaaatcaaaaggtcattttgattacttgcagaaccagaactttaacttagatatttggattttaggagtctctgctcttctcacaaccatctgccactgctctgaggccctgctgtgaccatttggcacttggggtagtatagttactaacaaattcaagtcacctttctgtactagctgtgaaaattggggtgagctaccagtgatctctgaacctaattttcttagaactgctggaaggtcaattggtctatcatatgtaaagcacatagtacagtatttagcacacagtaggtgcaccttattctactcctcccaatcttctctatttcctcaacttggattgtcactctttctcctgctgcttccagtatgagcatttttaaccttattggtggccctcggggctaaccccaaatgatatgacagtgggttccacaaatgatcttaaaaagcaatgggtcatgcaagggtggcaagtttgctgaaggtgaggacagcctgggtgtactgaggctattgaatgcctctctcagctaaaccgtgaaactggcacagactcattttggaggaaagccacggatggctcagcatacacttgctgggaagtttgtgatagtactctggccacctagagctgcagccaagtcctgattatacacaggagttaaaagggaaaaaagacagcaggcaaaatggaatcctccaataactcacagtcaatattttgggttaagcatccattcatctggggctaccagcttcacccaggcactagcatgagccttgccttctcctgtctgagcagccctcctcggggccagctcgtcacatctggaattctccagtggatcaggtctgctccagggtgacctctgtaagtctacatcattccctcccaatatacaatagcagctaccccaatccagaaagtgtaaaagtaacttaggaatgagttgattctagggccattctaggtgctctcaattaaaatcgggcaaagtattatattcagaatctctcaaaaagggattatatgtttgagaaagctgccagacaggagtggatccaggtcgcaaaaagtgtcaccagagtggctatgagttcctacacctttcagaagaacccagacttaataagcgttggtgaggatgtggagaagaaattggagctctcatacgctgctggtaagaatgtaaaatggcacgattgctttggaaaacagtttggcaggtcattaaaagattaaacacaaaattaccgtataacccagcaattccactcctgagtatatacctgagagaaatgaaaacatatgtccacacatatacttctacatacatgtttgtagcaacactgttcataatagccaaaaagtggaaacaactcaaatgtccatcaacttgtaaatggataaataatatatggtagatgtatactgtagattattatctggcattataaagaaatgaactagtgatacatgctgcaaaatggatgaaccttatgaaccgctaacataaaacctatgctaaatgaaagaacctattcatgaaagaccacatattgaatgattctattcatacgaaatatccagaacagacaaatccatagagacacaaagtagattgattgttgcctagggctaaaggatgaagggaaatggagagcgactactgatgtgttcagggtttcttgggtggttaaaatattctaaaattgcttgcggtggtggttgcataaactctgtgaacatactaatttaagggatatattgaattatataccttaagtggtgaattgtatggtatgttaattatatctcaatacagccgaagaaggaggaggataaggagagagaaaagaagaataagaggtagaagaaaaagaagaatcatggagacttttgaatgctctttgtcagaatctccaaaatatctcaagtccattatctactaggaggtaagatagcccagtggtgaattgtgtgggcgccagaatcaaaattagtgaactgagttatctaggcttcagtatcactacataacttctcgagaagtgacacctggaatttgggtagagtgttctgcattatctgctatacggtaattctcactttagtgagtatcaagttacctaaagggcttgttcaaacacacattgccgggctctactcctacagtgtctgattcagtaggtctgagaggggccggaggatttgcatttctaacaagttcccaggtgacgctgatgctgttggttttagagcaacaccccaaaaactacttattgaacatttagttctttaaagtccccagggtctattgagtagacttttcaaataacagcagaaatgcgtagcgcaaattagttatatgtgtatgttaatatacatactttataagtgcattatttgacaattattcataaatgttataattagtaactgtaactttgatgaaatgatggaaggcattgcagaatgggaatcagaagacatggggtcatatccttccagttctagaaatttggcccaaaatgttctctcaccacagtttccccatctgtgagaaactaattccaataatgcctcactaacatataaagttatgaggaagataacatagtaacctagttgaaaacacatggtcaactgtaaatgcattaatcttatgttctcaatgtctgcgtatggaaatcattctctatgcggccaccagaatctctctcaaaggcatcagcagtttctggaatctcctgagacactggatgagttaggttgctttcagctttaagtaacagaaatctatattaaaactggaccatagcatgaagatatttatttttgcacattaaagggaatccagctgaggtagttctagctgtagttgaaagaaatctgcggagagtggagatcaggcagaggccctggaaattgttggaaaacaaatgtataataaagatgagtgtttatgataatctgctttgtctcttagagctctttaaggtttaaaatagctcatatcatgtccagaatgcaagatacaactcatgagcatcaggatgataaactgaaaaaattaaaaaaaaaaacaaaccctctagcatagaggttctcaaccctggcttccggtgagaagcctatagggaaggtttcaaaggacgtcattgtcaggaccctgctcagaagcttctgatctgatttgtccagaaattgcttagactctggaggtttccaaaagctttccaggtaatccttaaatgctgataaggtggagaatgattgcttcagcatatcatgaatcagagagatccttctaagctaggaagaattccgatgccagcactgggcagttacttacggatggaagtggtgggagaagatggtgctaaaaacaaaactaagcctcacatagctgttcagcccagatcctctccccctcgcttcagtaaccatgatcatcaaagaaaactgcatgcccaacacacacacaaacacacacacacacacacgagttacttgttgctttattctcatgtatgactgtctttccctttcaagactatcttggtgtttgatctagactgaataccgtctggtaaatgtgccacaggctaggcagatggtgggattaatagtgtgatttttctctggctccacattcctttaggaaggtgactcttagcaattgatgtgaataagaatcacctggaaaatttttcaaaatataaatacctgagcaccccttgtgaggttatgatttagcaggcctggagaagagccactgtctacattttagcaaacttcacagaggctgtagatagaattggtctatgatcacaattctaagaaactttaagaacaatactgatgagaaatgggaaatactatgtgcttaagagatgcccaaaggtttcaaaaaatttgaaaagccaaatcatcaacggatgcatggaatgggtaatgagcacatgaaaagatgctcaaaatcatggatcattagagaaatgaaaatcacaaccacactgaaatatcactacaaacctatttgaatagctaaaattttttaatggcaattttctggtagtggtgggcaatggtatcaccactttggaaatcagctaggtagtttcttgctttcttttttttttttttttgagacggagtctcgctctgtagcccaggctggagtgcagtggcacaatctcggctcactgcaagctccgcttctcgggttcacgccattctcctgtctcagcctcccgagtagctgggactacaggcgcccgccactaagcctggctaattttttgtatttttagtagaggcggggtttcaccatgttagccaggatggtctcgatctcctgacctcgtgatccgcccgcctcggcctcctaaagtgctgggattacaagcatgagccaccacacccggcctcagtagtttcttttaaagttaaacatacattaccttgtgaaccagcaatctcactcctaggtattgacccaaatgaaataaaaatttgttcacacaaaaacctatacatagatgtttatatcaactttataattacatttatgtaattcattatataaaatataatgaatataaaattcattacataaaaagtaatgaattttcaaaaactggaaacaacccaaatgtctttcaactagtaaatgtataaacaatctgtggtacatccatgctatggaatattactcaacaataacaagaaacaaaatactaacacatacaatgagatgttgaattttaaaatggatgaaccttaaaagcattatgctaagtgaaagatggacatgaaaggctacgtgtggtatgattccatttacttgacattctggaaaaggcaaaaccatagagacagaaagtaaatcagtggttaccaatggctgggtgtttgggaagatttgactgcaaagggatataaggggatgttttggattgatggaactgttctaagtcttgattagggtgctggctatgttactgtacattatgtattttaaaaggtgaattaattatatgtaaattataactcaatgaaaagaaaattcaatgtgagggcaaaaatactgaaggataaatagggggtttatttagattaaacccattacattttgagagcagagcacactttctagacttgactgggtccaatttcagcagcatggtagaatgcttaagtgtagaaatcatatccaacttatctccccatgggcccatagtacttccttatgcaacttatgagttctcagagtagccctgcaaactggtatacccgcgcttatactcaagggttaaaaagtgttggattgacaacttaaaaaaaaaaacaggcattcagccttacagaaatcctagatggctctgttacttcagtctatgatttcggtattttgaaatcactgtctgggtatttgtgtggcccggaaggctagtttggagaacaaatacaggggtttgctagtagcgggtagggtaggacagaaaggggtgaggtgctgaaaggtgagggacaaatatgctactaatcagtgtttttcaagtgaatatttctacagggtagagcagcagttggcttttataatctagatacaaagttgttctttctccagggagcttcttagacttacatgctgctggtatattcctagaattccaccttaaaacaagctgaatgtccttatggctgacatctcagcatggaaaagttttgcttaagcaatgacacactgcagttggatccttctcacccacatctggaagccacatgtcagcggcagctatataaaacggtcagaccagcaatcttagagtgacattgtttgccaaaatcccaggcagcatggacctcagtcttctctgggtacttctgcccctagtcaccatggcctggggccagtatggcgattatggatacccataccagcagtatcatgactacagcgatgatgggtgggtgaatttgaaccggcaaggcttcagctaccagtgtccccaggggcaggtgatagtggccgtgaggagcatcttcagcaagaaggaaggttctgacagacaatggaactacgcctgcatgcccacaccacagagcctcggggaacccacggagtgctggtgggaggagatcaacagggctggcatggaatggtaagggccagtccctgcactgcactggggctgggaacatctctgcatatccctcctcctgggggctgctagactctcaaggaatatcagtaaccaaagcctgggcaaatcccaccccaaacctcaccactgcatgctctgggtggagcagggctgctgctgagcagactacatgacaggacaaaaacctgggatggggagtgtctgtgggagacagactcctctgtggctctgttccttccagaagctgttctacctactctcagtttgggccaggggctggtgtaggtcggcgagaagcttgcttaccagactaccaaaagatatgtacagaaactgaaagtaataaactttatagaaattaaaactttctgtgccatcggaatggcatttttcttttttagaaatttatttttaccattttacaaaagtactggcccacagtagtttgggaacaagaaaaataaacaattgatctctcagcacggagggtttgagaactattgatttagagcaagtgaatggaaaagaggggacaaggacatttaggcaaaagaaagtggaattaaatagctgtctactgccttgattaaatgtgctctctcaattatgagtactgaggtccttctctctgcctgaatttaaagtgggttttattgctggaaaatagtttactaaagggttttggagagaggtgctgtcttcccctgactgcattctgccctaagcagtggcatggaattttttcgagcttgtacttttttgtggggtgtgattgtctcagctgggtctcagcccaggtgcttggtcaggagctcatcctagtaggcactgactgctaggctgattatttacaacagcctagatggagccagcactctaggaggcttggaggagagaacggaggaggcagtccagggaggaggaagcccacctggagggctgctgcatgtgctatctgtagagcaacccagatgtgtggcaacaagtacttagtgtagtggggattggaggggtcaagcacaaaatctggccaggtgtggtggctcacgcctgtaatcccaaacactttgggaggctggggagggaggatcacttgagatcaagagttcgagaccagcctagggaacacagccagaccctatctctacagaaaaaaaagaaattagcccggtgtagttgcatgcagcctgtggtcccagctactcaggaggctaaggtaggaggatcacttgagcccagggagtcgaggctgcagtgagccatgctcgcaccactgtattccctcctgggtggcagagcaagactctgcctcaaaaaaaaaaaaaaagaaaatagaaaaaagaaaaagcatagaaccctgggggacacaaccagtagagaggtgatgatgggaaatccaagaggaagaaacaccgatgggtgggggagccaggaaagagagcgggcctttaagtaatgacaacagctaccatttattgagtgcttaccctgagcaggctccatgctaagtgctttatgtggatcatctcgtgtaatgctcaaaacaagggtatatgccatttataggtagacaaactgcagtctagagatccagtatttcctcggctagaaagctggggtttggatccacagagtctttgcttcaaagagtttgtactttgccacagtgacgggctcctgagaggctgctgcctccacccagagtgggctcccacccgacagctgactctgtcagcagagccagtgccacaggaccagattcagggcagttcttcctcctggagagggtggggacctgcaagaccacagcagaagcccagccccagagggatgatccctacttggttaccaggactgtggaggggctcagccggactgtagaaggggtggggagaggactcacacaggcagcagcaggtgagggtgccggggctgtggaggctgcttggacagcctttgtgggccattctcatccacccccatggcctctggtgagcagatttagttattcaaaaccccttctgacagatgctgattcagagaccaggctcaccttgattgttgtctccatgactcctcacagccaggcccactgcctaatgtggagcatggcaatgacctaattacaactgtccctccagtcctcacctctcaggagcactatcgcatgggtgcgactcctttctaacagccgttttttgtgccacagtcaagcagcactcagccatggttccccaagccatagaggaagagccctaggctctgaatcaggaggcctgggtctggatcctggttctaatgacttgtggtgtgaccttggcccagacgctcagccctccagtctcccgcctcatttggaaagtgagcagtcaggctgcatgatctctgaaggctccacagagctgtggctcacccctgaaaacactcttggctttttcttgcattctgttgatctttgtgttcatccctgctagagagagaagccaaatgatgtttagttttaaacttgccaactgtgactggtttgtcatgaactcccaaactatttgaagaaaagcaaaagaggaagaaggtgaaataacatgattttatttggcccatgggagtcaagggaaaagctgataggcgagatacctcttccacctcctcttactcggcatttttgggtgtgcagtgtctagtaattttggtttcctttcctccttccaccctctgttgcctccttctccccgtctactaatcacagggttgaaaactcacaaacatgcaaaacaacttctttacaataagatccagctgccccaggactgacacgaattaccctggaagcacttttaaaaatgattatgcctttgagttcagcctccagtctcagtgaaaaatctgtaaggaaagaaattgcttatgggctggggagctattacatctgacgttggctacaggcttagtctgttctcagggaacagttgttgatggttttgtgcagttgggctgccttgtataaccaaattagctttcaggtttattttaaaagaggggaggagtctcgaatataggtttgacaatagcacataggatctgctaaaaagaaaatctttctaatcaaagtgccatctttaaaaggtgttgccatcatagctgagtggtctgtggtgctgccattgatcacagtttctctgttgaaaatcacctcttcaagtgccggcttctgaagtttggatgatggtctctggcactaacaactaccaggaggccttacctgggtccccatgagtggtatttcaccatcccagggcatgcctaggttgttctcagggaatctgctctaacttgggtcagcacaggctgtagggcactgggtcctgtgtggaataagatgaaggtgaaattttctagtgagattgagctactgtgtagcggaaggagccctgggcttggatgcaggaaacctggattcacagctcctgcttgtatctgtgacattcggtatctcattctggcaaaaaagaaagagaagaaagaaagaaagagagagagagaaggaagggagggagggaggaaggaaggattgaaggaaggaaggaaagaaggaaggaagaaaggaagggaaagagaaaggaaaggaaaggaaaggaaaggaaaggaaaggaaaggaaaggaatggaaaggaaagaaaagcaaaggaagaaaaaggaaggtgtgactcccacctcacaagctgctacttgtgttactgtgatacttgtaggataaagtataagaaaactctaaagcaaattgaagtctaaaacaaatgcctagcacatcatgggcaggtagtaaaagtttagtgaatctgaaattgatgtggctgatgttgggcaagccagctttccacggagtctgagttcagaggaaaagtgttccatttattggtatctactttttaccccgggcttcaaagaatctcaaggagaagttttggagtggcagtttgtgttagagctgagtttatgaattcaatgacaagccacagactggagaagaggagaaagaatctatgcaacagggctatggcagcatcgaggtgcatttgaaggtggagaggttgggtgggaactccgttttccatggtcggactatttccctaatctaagcaagaccaagcctcagtgtagttcagggcagtcgtcctgagtcatggttctgagtattgagtactcacagggcccacttcctcggggatgctttccaagaccacctcctctccccacacatctcgctgtctccactccctcagcctgctttgtttcctacaatgcccttgtcactacctgattggcatttgtttcttgttttgtctccctcactaaaatataagcttcatgaacacaggggctttgtctcattcaccactgtatccccagtgcctagacaagtgctggtacataacaggccctcaatacatatgcagtgaaagaccaaatcagcagtccaaaccccagccagtgtccccacggccctccgcaaggaggcctgcaggttttcccacaggggaaccattttgcttatgtctttgattcccaatattccagtgtctatagtaggggttccaactgtattgttcacatctcattttgatttattgcatttaccaacatgcaggatggtctttcaagatttcttaaggatcgctaaaacatgcacagaggatggctgacacactttgccgccgcagaatgaagtttttatcaggttttcattctctcaataatcttaaggtctcgatcaatttcaaaaattgaaagtaaactctttatttcaaaagccataagggctaaatgctgcacagtaacctatcctggtttgacatttgtggaagaactgatgaaatcagtttggtgttataccaaggttaatttcttagcatttcttagcattcctagacactctagagttatgaaaattaacattagaggaacctgggtgaagagtatacatgaattttgtgtgctgtctttacaagcattctgtaaatctgaaattacttcaaaataaaatttaaaaaaataaatataaggatgcagcacaaatatagtacaacagaatcgtggaattccagcactggagggggtcttgggcacaatctagagcaacctccttacctcacagaataggaataaaggccatgagactgaagcaattaaaaactgaataaaaacattgctgtcaggttaggaactgtcatcctctttttacaaaagtagatataaatatcagtagaaggggagagatgggtcatggagcaattctgtttggaattaggagagaaatccataactttacataagtataggttctatggccctaaccctgatctacgtggtgatttatgatttatagagtattcctcatttatatgttcatttgtttattcattcactaccaaatgcttattagcacaaactttcccaggccccaggaagatggagatgaataacatacagtctatgcccatgagttattcaaaagctaatattgtttgatcttcacaacagtattggaatccaggtgtttcacacatgaggaggttgcccttgcatggctagcagatggcagacggaggacctgagccagccagcctgattccacagtgctgtgggtgatatgaaatgctgatgttatttttgttcctggataaagccatagtgagtgctgacctaaaaaagatatcaaatccacctaaggatgacttctgagggcaagaaggctgagtgtgggagaatagggttatgacagatctaggattcttgccaactttccatctaggtcactctcctaagtgctaggaatcaattgtctgggggaacttgagctctgcaaaaatggttgttggctgctcttgtaaggatggcaaaagctccctcctcccaggaggggatttgcttctgtctgggaacctgcaggacacaatcttctcaatcaataagagatttctgcagagttaagatatcgtgtgtgtgtgtgtgtgtgtgtgtgtgtttctttgagggatcttgaagtattgaaaagttaatgaagtttagagtcagaacaattctcaaaatgcagccccactgaccccactactacctttactcaagtcgtctcaactccgaaatactcagctttcacaactaaaacacacctccctagaactgttgttgtgagaattaaataagataatatatgtacattaacttgtgtccttaggggaattacttaccttctctaaacctaagtttccttatacgtaaaatggtgatcgtggtgagaagctcattatttgaacccattttataggattgttttgataattaaaataattaatgcacgcatagtgctaagcacaatgcctgcacattgcaagtccttgataaaggttatttattattactttatcatgactactctgtgtaaactgagactcatggagacaagtatcacacagttggtaaattacaaagctggagttgaaaaccaaattgctagattacagagcctctgaaatatatcattttgcttttggaacatataatttaatcacaatctataaatattatgtgtacattataagtgtcttgaatatttattacattttaatagacacggagatagcattagatctcttgtttaaaaatattataattgatattcataaactcacgtcaaatttactgtgatgctaatgtagctcatgcaattcctgtgtgacctggaattgctctcaggacataaatgcatctcacaagataatctagatcttctcagaggccttaggggaagcctctcctgcctgtatttttccaaaaaaaactgaggaatttgtatttttggaggcattctcgctctgtcctgtgctaggtctttctatccagagatgctgttctgcaggtcatttctgcttcactgttaaaaccttgtagacagactagcagacttaaaacctggacatggagaagacagcagaattcttacccagatgcaggcaggaagagagcagaatgtgtgcaacttaacactatttaaagagactgttcatatccccaccatggtggcaggaggatgagcagtaaacggtgcagtgttcaaaaactttgcattgtagccccatgaggctactcagtgacagtatgtgttaggtgaaatgtgtaatggtgatatcaacatgtcacaaggaaggaaagttagtatgatttggaattgtcaagaaaggaaggatctttgaaggaggagaggcttggtattgccttttgtgctctgatatgtgctttctgaggctcctctcagtgtctaattggagaagttcaatcctgacaatttctaatgtaggctccaatatttactgaaagtgatgtttcgtgactaggatgtagcctgtctttctatcagattacaggtacttttatcatcatggtagtaataactatgacttcccctgcctttcaattatatacgttgtgccaggttctatgctacacttgatatatagcatctctttagtttttgtgtaatactgtcaggttaagaactgtcatcctagttttacagaagtaggtataaatatcagcagaaggggagagatgggtcatggaacaattctgtttggaattagcagagaaatccagaactttgaaggcttcttttactgggcaaacttgcccccaactgtgtttgtctctgtcccttgccacttcactgctccactgtccccaaccactctcctatttctctgctcctctgtctttggtaccagtctacttatttccagtatctgtattatcatagtgtctgcttatcagttacagtgtctggtaattctgcctgtccaatgtcatagtgtttacttatcagtaccagtcttctgaagagattccagaccaagtgcagcatcaggtatagagtaagttctagtgaatatttgtcaaaagacttaatgaacattctaaaattctgtgggcctttttataaatgcctgatagcaactcaaagaattattctggggaaaatagaattaacaaaaatcaaagctttactctaaaagaaagaaactcttttggtactatttaagacctcatccacctttggggcgggaaagaaatttgggagtgttaaggatgctgtgccacatggagtgagccacttgtctagatcatgggcaaaacttctcatagtccatctctgcagtggggttggaaactggctaacagcccttgaaacacctgtgtgtctgtgaagctgggaaaaaaaagaccagcacaaccagcccatctattatctatttaatgaaattttgagagttcttgaccaagatggtgctgcttccttttaccttgttcatcacttgactcaaccccacaccacaccacctaaagtccaaacttcttagcaagtccaacttctaaaattgtatagaggggttcaccaacaaaaccagacactcacacaccttgcaaatgctctgtaattctgcctgtccaatagctttggacttggtaaagaatgcagacaacaagaagaagtcctgtccagcataccaatcagagctgtgggaccatctcgaagagatttattatatttcttgagagctcatgaacatgagctttgacctcagatgaatctgagttgggtcctggctcttccagttactctcttggccgagagttttgtaggcattatcactgactccacacagtgccttaggtgaggctccacaaagcatgtaaaggtcagggctaggactagaactcatgtctgctgattcctcaacaagggctctttcccctgcaccccactgctgttatgttttactattgcagatacaggagaaagtcttccgttttagctttcagggtgatgaccctgagataaatcattttcagaaagtccactttctcagaataggttcacaaatgtgttttcagaggaggagtaattaccttgtgactttccttctagaaagcttccagtttcagatggagcagggctaacaatactccagtttctgaaactgaaattgaacctcagccttcaaagaggtggtaagaaaaaaaaaaagtatgtcttctcagatgggaaggagagtcttgtaagtaaggtaccagtgccctcctgctctaaggaaatagtcttatttccttagagctgcggtcatgttatacaattcaccaggatattagccatcgtattggtgactgttaggaactcctcactcacatccatgaaggggcctgaaactccctccaagtagtttccctccaagcggaatagagcattgagccactgccctgttctccaggccattcaggagcaacaaccaggtgctgtgaagtgagtcagagcattagtcatttgaccgctacccatctcttttgaaattgagtttgagtaactttagcaatgcaatccctgacagttcccccagtcctgttccatttagaagttgcctctcttctcacctagctctgtgtttgtaatcctgcagctatggccagtgtttaggtgagtcttgttaaataaggagctttgttaaaagtgaaaatgagaggaatggaggagaggaatgcccaaagctatatttattttgccccctcatcatggagctgcagggagagaacggaagcaagaaaagggattgctcacccaagatccatgtaaactacttggagggagtttcagggcccttaatggaattgagtgatgagctcttaaaagtcaattctgcctccaataatgggacatagtcgggtcactcattcggtccctcattcttctattaaacatttgctggacaacaatgtcagacactgcatggaatactacttcctgagagtggtaaggcatactaaagtacctgtgctccaaagtgggtggctaagacatccaacctcattgagctttgttttagggaaacagcagctcagggagggcctatgaatccaccagtgttttactgattagagacaggggagccaagggacagcttttacaaagtagactcataattactgtgtagactaaacataagtataatgacactaataagcaatttattaatcccaggaattttacatgcgttgtcttatttggtcttcacgataactttaatacatatgtgctattattatgcccattttacagatgaggaaactgaggctattagagggcacgaaacccgcccagatgatacagctaagaacagtggagccatccagcagcatagccaatgctcttggccactctactatctgctccccacagtgtgaaaaggtacccccacaaagatccggctctggaaggaatgctttcacataccaaactcctgaacaggctgactctaccaaaatgtgaaggcaatcaaaccaaagccggaggaggagggttatgtttggttatctaactttcactatatgttcttaggctctgagtctgtagggtccaaataatcttcacagggcagagttatctgaggtggtgtgtgagaaagtgacacacacttcccgtacaggcactggggccagcagcctggccaacagctggcggggaatttgtggaacttggattgccttcagaactggtactccatgaaacagttcggcttatcttcctacatttatttttacttaggggaacttacccccatgggagctctgtcccctataggggtctgagtacagaagacaagccaaaacaatggaacaacaactccgtggaaaccacagcccagctcagttctgaaagggctttgttttagaggaaggcagcattttagtgatggtaggagaacaggtcacagagagcactagcttatggcaaccttctctttttggacacatatgagttttgcttatgattcttagagcttcatattgaaattacctctcacctactttactaagaattaggatagaatagaacaccctggtagatcagcccctaaagctacctttccaccatatcatgagcctagtccattccactcatatagcttgctgaagtatgccaggcatttacaaagtgattagtatactcctgatgagatgcgagcaatggtagaatgaagaaggctacatcagtcatatgcagaaaactgaaactggaccccttccttacaccttatacaaaaattaactcaagattaattaaagacttaaaggtaaaaacccaaaaccataaaaaccccagaagaaaacctagacaacaccattcaggacacaggcatggacaaagacttcataataaaaaacaccaaaagcaattgcaacaaaagctaaaattgacaaatgggatctaattgaactaaagagcatgtgcataccaaaaggaactatcatcagagtgaacaggcaacctactgaatgggagaatatttttgcaaactacccatctgacaaaggtctaacatccagaatctacaaggaaattaaacaaatttacaagaaaagaagaaacaatcccatcaaaaagtggacaaagtatatgaccagacacttctcaaaagaagacatttatgtggccaacaaacatatgaaaaaaagctcaacctcactgatcattagagaaatgcaaatcaaaaccacaataagataccatctcatgccagtcaaaatggtgtttattaaaaagccaagaaccaacagatgctggcgaggctgtgaagaaataggaattcttttacactgttggtcggaatgtaaattagttcaaccattgtagaaggcaatgtggtgattcctcaaggatctagaacaagaaataccatttgacccaacaatcccattaatgggtatatacccaaaggactataaattattctactgtaaagacacatgcacaggtatgtttactgcagcactatttgcaataacaaagacatggaaccaacccaaatgcccatccgtgatagactggataaagcaaatgtggtacatatacaccatggaatactatgtagccataaaaatgaatgagatcatgtcctttgcagggacatggatgaagctagaagccatcatcctcagcaaactaacacaggaacagaaaaccaaacagtgaatgctctcactcataagtggaagttgaacaatgagaacacattgacacagggaggggaacaacacacactgggaccagtcgggggtagagtgtgaggagagggagagcattaggacaaatagctaatgcatgcgggccttaaaacctagatgacaggttgataggtgcagcaaaccacaatggcacacatatacctatgtaataaacctgtacattctgtacttgtatcccggaacttaaagtaaaataaaagaaaattgtaaaacctagatacatgtataataaactacacagttgcacataccaaaaaaaaaaagctagatcatcaaagagccataggtctcaatttacaccttaacctgcattactgagcccctatagctgagttttctagtctgccagaacttcttacaagtcctgggaacagggaattcaagctaatttacatggttgaccgaataccgagcccatctctcaattcttctcacaacataatagcaaagtgattgatacagaacagtagtagagtatgagatgtttaataaatgaatgaataaataaataaataaataaatgcatatttgaattatatacattaggtgaataaatgaataacaagtaataaataataaatttaaaaggacggatgatttctgatgacagacaagtaatatatttaatatctaattttgttagatctgcaagttcattttcagcaatggaaaagaataaatgaaatccacttgttgataatgttacaatttgtgtgtcaacaaggcctctctcaccagtcagcacacggtacttactttatgcattatattttctgaaaacttatcttcccatgaaatacaaggttgcattccagcagctgtctggccatgcacatagacaactgcctgctctggctctgcccactcataagaggggatagaccaatggctgggatggtgggaaatgcaaagaaggagaggtaactgaagaactattttggaagggtttgtgaaagagctcatgctataaggtggaaatccactggatttcatcaaagggccatggctcaccatacccatctgggctttgcatgctgtgtgggggcagaacaaatgatcatccttgtgctcaatttccagggctctgctgttaagcagaagaaatgtttatttgaaattcgtcaatacattgtgcttctctttgtcttctttttattttaaattccagtaaaatgaattataatatcttttattttaaatgacatgcataatacaatcttgaatttgtaaaattctagatgtaaaattctagatcctggataagtagcaagaacagtggaaatgccctgactgtgtagagcttatggtcttgtgggtggtggaaagattcctggataagtagcaagaacagtggaaatccactgtggtcaggtagaaaatagtgttatcatcacagcaaaaagtgggaagcctgaagacgccataggaattgggcccaggaatgggagaaaatcatactagagatggaacaaaggaagaaatgattgtactattctaagtcaatgtttagttcaaaaggtgctgtgaagaccagcagcagcacaggtagaatgaaagagcaaaaattatttcttgtctgtggactggagtggagcggttatatatttgaagaattaggactaagcagctaggacaggaaagggatctttagagggggtttgaggcattcagttggcctgttgcaactctgtaaggactgcctccacagccaggattcttggtggccaccaggaatagaattctgagaaaaacatgccatggctgtgtagagcttatggtcttgtgggtggtagaaagattcctggataagtaggaagaatctgggttgtggtcccagctttcctactgggctgccctgggcacattcaccatgcccatctgggctttgcatgctgtgcaggggcagaacgaatgatcatccttgtgctcaatttccagggctcttctcttaggcagaagaaatgtttatttgaaattcatcaatacgttgtgcttctctttgtcttctttttattttaaattccagtaaaatgaattataataccttttattttaaatggcatgaataatacaatctcgaatttgtaaaattctagatgtaaaattctagatccacccatttatgcaggcttccatctaacaatatatattgaaagaggtatgacaggggcagtgttccctaaattttgttcagttagaaaattctgagtcacttaaattttaatggaggggctatgttatttctacaaatataataaagactattatttgcataaaatggaataaattgttaagaatctaggtcagagaaagagtgtgtaactgtggcagtggggtcttgggaaggggtctgtgtatgtgtcactgttcttaggttcctggggttgtcttctcttcaggtaccagacgtgctccaacaatgggctggtggcaggattccagagccgctacttcgagtcagtgctggatcgggagtggcagttttactgttgtcgctacagcaagaggtgcccatattcctgctggtgagtctggcagccgaccaaaccctcatgactcctggggtgggagaggcacctaggaagtgctctagcttcaggtaagcttgagggtcacacacaagcctggaaggcagcgctggcatatagacaagaatgaatgaatgacttaggaggatgttcccgccaagagggatctttcaggttatccaaccccccacatccttcttttggcagaaaaggaaacagaaccatagagccggcactgactggcccaaagtcacccacctactctgtgggaatgccaagtcttaagcttaggcctaatgactcccatcccagtgctgttctccttctccccaacttctggtaacttctcatcatatccaaggctgcagggcctatttgggaacctagtttcctgtagtctttctctgggagaaaccaatcctctcatgggtcagagtctagtacatagttatagacagaaaaaataaaatattaaaaaattaaaaaattaaaaaaaaagattgtgctgttttctggatccatttggaattccagcctctgatgttttgtttctttccctatccctgggctcatgccgaatatctcctgacctagccttccaattgactaggagaatgtgtatattgtcatttgccctgatgacttacactgggtgttgataacacaaccggcccaggtttttttaatctgaaaatgagccaggcatttctgccttgggcaaggggatccagaagtgtcaacatgtgaaggttggctccctcaagtgattgatctctctacagtttgatgcttgcaaggacagcttcacaggtcatgcttattctctgcaatcagacagcttactccacagatgcccagtggcacacagtatctctagggatacaaagccccaaaagcttaacgtttttctttttaaagtaaggaccgatagtaaattcagagctcaaagtcacctgtcactgtatgatggagcagaaacctcctctagttcttcaaaatcgcttccataaagcagcttttactcctctacagtgggtgaacaggcctggcaaaggattacgatgccactgggataggtcctgaaccaaagacctaaagatctcttgcagtggaggaggtagaaggagcaccagtttgggcaaaaagaaacttgagtttcagtctctgtgttggcctttcctcacttccctcccttctttcccctttccccttctcccctccctctcataactctgcaggctcaagcacatcacctaaaatgatgaccaccttttttgagtctccaagatctttaagactctgatgaaaactatagaccttgtcttcaggggggaaaatgcacttagcatgttaatacaatagtttgcagagaatttcgggagtccttaaactccctgaaggccattcatgaacacactgccaagaacccctggatcataagttgaaattccaaggactagaagatctttcaggttgtgttgaaccctaaaaatgtcttaattccaaagacacttttggaaaagatgatccagatgccagaactgttttgagaggatgaaggaagttccaaagacgagtgcgccctaatgaaaggggagagtaggtaggagcttggcctccacaaatctctcattcctggtctattaacagaatggcacttcccacaaggaaaccagcctccctttgttgcaaagcattaaaagccagttaaaatgtatgtaaattacctgaaagagcaagcaaaacctaatactcagtcagtgaatttatttactacattagtataactttccctgaatcagactccaaaggaacacatcagggctggggtatgctgggtggccaggaggagtgggttcaggagcaggggaaagagtgaggaggtgaggaggtagccctgcacgggctgcagtggggaggaaggggaacatggacagcctaggggcagctggaggcctggatgttggtggctctgtctctctgcccttcgtagatgcctctgtcacagcactttatgcattttaccacctgtgtacagttgctcctctctacctggacttccagtgtctggaggatatggggccactcactgatctttgtattttcaatgcccagtatagtgcttggaacatagtgtcttcttaacaactgttgaacaaatatccacattaataattgtggagggtgtatataatgtgaagtggcccagaaaatataattctcttacataaaattttttgttctctcccccatccctccacttctgcccagaatataagctctacacaagcagagatctttgtgctgacatatgccaagccctataaataatgacaggcacataacatttgtttggatgaaggaatgacttcaggctactttttgttatgagcattaaataagataatatatttctggccttgccactgtctatgatcacacagagctgacctgtcttgaaacagagtccccttcaccctcccagatgcaggagagacccagcctcctcaccaactaacaggacattcaaaggcaaactctgcccaggaacaacctagcaggtgtcaggtcattgcaggaagcagaacttgagagcggggttggttatgcagaggaacaagacatgtgaccagttggacagtctgttgttagatgtactaactcattcttccccaggcagagaggagtaagctgaggcagcaacattcctcatcacagcaaggctcgaggtctctgcagagatgagtgggagagcctgctgtgtctgtggccatgccatcatggttggctggcccctgcccaaacagaacaacaacagatagtgggcttgggcctcaaggctttgggtgaccaggcaggcaaggagctaaggctcactggttttagaaaatttgtcaaggccgggcatggtggctcacacttgtaatcccagcactttgggaggccgaagtgggcagatcacaaggtcaggagatcgagaccatgctggctaacatgatgaaaccccgttctctactaaaaatacaaaaaaaaaaaaaattagccaggcttggtggcaggcacctgtagtccctgctactcaggaggctgaggcaggagaatggcatgaacccaggaggtggagctcgcagtgagccgagatcacgccactgcactccagcctgggcgacagagcaagactctgactcaaaaaaaaagaagaagaagaaaaaaaaaagcaaagttgtcaaacagaagaaatagggggtggatgaaggtaagtgtgagagaaagggataaacatctaaattttcctggaattcccatattccgtggatctgtgggatctgtgttaacactctgagcattgcttcttgaagcttatcctgtctgtttatttgaatgctgagacctgaaaaagacaggtctttgtgtttccagttccaccgttgttttaatgatgccccagatttccagtggtcacctggagactggttccaggatacttctgcttccccaagaatgctaggtatcgttcctctcacatactttagaaaggcttctcaagctcccttagatgcaattcaccagctaagatgctaaaaatgtaatgatcatatagacatatatgtaggaacaaagtctcaatgttaaagattgatagataaagatgagcaattttgagttgccagagatattcatgtctctgctcacaaagtttacccaaagccttgatctgcaatgactttgccactctgaacccaccccaacccccatacccttcacccttccttaccccatcctaccatccagacatgttgctgttggtctgtggagccaaaaggtggggaaagtacagagaattaatccaaaaggcatgacaagtcaactttgaaacaagtcccactaaggtgtggttccacctggctggttctatttctgaaggcatggtgttagagctgagagctatcacggtcaccaaataaaatggtattttttcaaagaaaacattggagaagcagcagaacaagattcaagtgtgcaccatggtacacagtgtatgactcactatcccgctggtgtgtctagacattttagtggcatctttaaattgcctgagtcatgatgttgtattatatgtctttctaaatgcctccagggcataaattaggtcttattttttcaacatctccaggatattacccagcacaaaatagactcttaataaatgtgtcagatgaataactgaatgttgcaagcccctaggaacagtaacaatggtgaaacctgacattgatgtgatgatgttttatagttgacaaagacttctttcatgtacattattttatttgatccttttaacagccttacagagtgaagtgagaactctttttcctgcaccttcccacagtgaaatgctgataaccctcttatctgaaaccttcccttacatgactttaattagcttgaattacctcccagggaactggacccatgtgggtgggaacgacatttttccccttccctctttgaaaggcattcttcagcacgcagcctgacactgtatgaactagctaagtgaatatctagcgcctgcgtttgtgagcacttagggattcagaaatatcatcactctgggctggaaaaaacaaatcatccaaccaactcccaaatgagtatgagatttatttgtttggtgggaaccaaggtgctgctctcgtttcagcttgtgcggtttctctttggatattacagcctcactggactctggcaagaaagcaaattcctgagagatgtggacatgccattaggaaatggtctccactggattggatgaatagtgaattttatagatatttatttagatatgaaaattctaattcttagtctagtggtctgcaaaccacaaacacatgtcactgaagttgccacaaccctttagacattgtttgtcataatctctcttctccaaacagctcagcagctgcaggctgcacaccagactgtctactgtccaggcggagactctgtgtcccaggatctgatggttgtgaatcattttcttttccaaatggctcttctccagacccatggcctttcattaggttcattggataatatcttttgactgtaaaataatgcatccatttaggtaacctttacttttctcttcaaccctgatattctgtctctcagactttgcattctccactgcctacttccccactctctgtgtgcaagtcataagccagagagtgctttttttaaattcctgtatagctctagttaacatcagttgattagaacattcttatctctcccaccccaaagcacccagtcaaagctaatctttaattcttagcctctttgttcagatgttaatacaagatagggagtgtttgcatgttcactcctgtaatgctgttttagggacatgaacaatctcacaggcctctgcattgctgtgcctgtcatatgccacctgtgcccagacagcctcctgcaattcagctcccagaggcctggtaagaagagcagcttccattaggtatatctcctaatgttagttaacaggtgcagcacaccaacctggcgcatgtatacatatgtaacaaactgcacattgtgcacatgtaccctagaacttaaagtaaaataaaaaaataaaaatgaagagcagcttccatactggtcctctgcgcaagctggaagctattactatagagatggacatacttaagttttgaggaaattggactagatgtctcaatttaaaggaacttatattgggtttagatgctctgcgccctactaaaaccattgccttccattgcatgatgtacatagcactcattgtgcagacagcagcctctctgaacttgagcaaaatctatcatccctttcatctgctggaatggtttccataattattgtgccatatttaaaatgtagacatgtacaattggcactccatatctggggttccctatccaagaattcaaccaactttgaatcaaaaatattcagaaaaaaacaataaaaataaaaataacaatacaacaataaaaaatgatacaaatacaaaaccatatagtataataactactcacatagcatttgcattatcttaggtattatacgtaatctagaggtgatttaaagtaaacaggaggatattcataggttatgtgcaaatgctacaccattttagatcaaggacttgagtttctgaaaattttggtatccatgggggtcctggaatcaatcccctgcagatgccactgatgactgttgtattagtccattctcacactgctaataaagacatacccgagactgggtaacttaacaaaggaaacagtttaattgactcacagttccacagggctggggaggcctcaggaaacttacaaccatggcagaaggagaagcaaacatgtccttcacatgatggcaggaaaaaatgccaagcaaaagggggaaaagccccttataaaaccatcagatctcgtgagaactcactcacgatcatgagaacagcatgagagtgaccgtcctcttgattaaattacttcccactgggtcccttccatgacatgtggggattatggaaaccacaattcaaggtgacatttggttggggacacagagccaaaccatatcgactgtatttggtgcctgcattataggtgatacctctctccttatgttcaaacttcaaaagcagaaatatcatagatgtgtctggctaagtattggttaacccaaggccagctacttagaacaaagtaaacctctcagttacaaaccaaatctgatgctttattctatctagtctgcttccctctactataatagattctagaggcaatcattcttacttctatttattaattcacttaagcagtcaatgaatgtgaatggatatgaaataataacaattcataggctttgggtgagaccctactaatgataatgatgataataataatatttatttattgacacttaccacgtgttcctgtgttactgcatttaatcctcacacacaaaaattatgatactatcatacagatgagggaactgagctatagaagttgtggctcccttcaaagttccaaacttgactcaaccagtctatctgcctccaaatcccatgctctttgcatagtactgagctgtctctagatgaggaataagacttctacaggtgaaatattacataatagcacagtaggcatctggtagaaaacagagaataaaactattttaattggaggggagctgttgaaggtcaagtagcccccactgacatgcagacccagggtgaccaccacataatgtggctaatgaaaatcaacacgagtcaaagtgaatgtgcttactgactagccctgggcttggacagtgagttagaaactcagttccaagagagcaatttggaaagtgttcagggactttcctctactcatttaagctacagatatccctggaactgttattccttcgtgttgtgatacatgtctgaaatgtttgaaatgtaaagtcccaaaatgccataaaaggacagacatggacatttgtttttatttcacacacctcagagcccctgggttcagattttctgtgcagagaagggcacttgggtgactaccagaggtcccgcttggccaatccccagctcttgtgggaagaagcctggggattgttctctgtggctgttttcctttacacataactccatttggggtttattttttctgtctttacaaaactaattcaaagggggtctgatgtagctcctaataaagacaaactaaattaatctgaaatatgttcattccttatagcttacttggaaaagcattatgcaagaggattgatcatgaacagactggctttatttaacaaacttctcaatgatttgactgtcagaaagggacatctttttagctgaatatataaaacgtaagccaacctcaacacaccaaatccgcaaatgttgagtttctcctccaaacccacctctgaaccagatcataaaagcatatttgattccatgcaccagtgatccctcaaagagctcactatattggccatcatgatgttatacagtattctattatcttgctaaatatatagtgctgatgtattagtccattttcatgttgctgataaagacatacccaagactgggcaatttacaaaagaaagaggtttaatggagaactcacagttccatggctgaggaagcctcacaatcatggtggaaggcaaggaggagcaagccacatcttatgtggatggcagcaggcagaaagagagcttgtgcagggaaactctcatttttaaaaccatcagctctcatgtgacttattcactagtatgagaacaacacaggaaagacctgcccaaaggttcaattacctcccactggatccctctcacaacatctgagaattcaaaatgagatttgggtgagacacagccaaactgtatcagctgacatgtcacaggacattagaatgggatatttaaagtaaggtgctaattgagtggtagagaaatagaagaaaaacagaattcaatattgaatgaccaacagaagcttctctaaaatgttgtttgagcataagctgggctataaaagatcatttggaagacattctaattttattcttattttttaaaaagctgaagtatggcttcctcaggtacccgttctgatctgttcatatgtaaatgctggggtttttttccagtttttatggtagggagtctgtggtgtgtgcttttctggtgtccccacaaagtgggccaaggttggggatatgatgtttcctgaccatgagatgaagctgtatctgttcatgtgcacatcaattggagggaaagtcctgaaagaggagcttccaggtgacaccgactaatccagttgccctaatttccccaagtgaaacagctgtaacaaacacatctcagtgctatgaagtttgactttcatagaagaaaagtgtctagctccgaataaggtctcgtagaggtgggttttcacaaaaccttacgctgagtcactttatgtcaaggaatagattgaaaatctttactttaactattaaaaacctaataagttctcaacccaacctctgacaatgaataaaattggccactgtatataactagattgtatctctatttccctttctaaaatggatgtgagagcgtatacctggactcagctctgcaatatgtctgttcttgtggcaacggagccgagacatctatcagcagcagctcagtctatgatattgtatcatagcaaacattcattgagtccagttggatctgttaataattttagagcttcaagaatcttagatgagaaaaatcctatatcaatcttaaaattgtcttcagttcgaactgatttccctcagctcataagtaagatattattaatttttttaccatcagcttcagctgacacaagagttgtgcaagtggctttatgttatcaagttttttcttagctttggaacaactctctgtctttcatcttgacagcagaaaaagtgctgtgaagtgagaaactgtaccacaagagtcattcatctgaaagtgcgcatgcacacacacacacacaccccacacacacaccagtagttttgctttttttgttgttgttgttgtttgagacggagtctcgctctgtcgcccgggctggagtgcagtggcgcgatctcagctcactgcaagctccgcctcccgggttcacgccattctcctgcacagcagtagtttttattaaaaattaagtaatagctaaaattgaataaatctattcaaacactttactttaggggaaaggagaaaataaggcttcccatagaaatgtttgaaaagtagactcatttcaataaaggcatcttcctgacctgcgctcttcttcatcttgccaagctgaaggtttgtttgattgttttaattggtctaggaatgtatggcaatgctcagtatgaagtgtgtttttccaaaaaactgcttaaagtgacctagtaattcacaaggaattcacaaggaagctgcaaccacaccgaactcttccccgacctacactcgcaaagcccagtgtcacagcttaggaaaccctgatcattctgcttccttgtagcctcttttaatttcctgaaaagtccctatgccctgtctcagtgtctagttctgaacgtttaaattcttttttctctctaaggagctattactgggctttcacttattaggacactttgtgcgcgtgtgtgtgtgtgcgcgtgcacatgcagtgtcatcaagcgctaaatgcagccacatatatctggtttgaaaatacagaacagagcatcctgggccacattgactcaatagttcttcctatggatggtgtttgggaggttcactttctaccagtgatttgggtcatttctcccttggtatttttatttcataaagtaggagagatttccatcgatatccaacctccttccctatcctcctttacccaggtttctctaggacagtctaaactcaatcccatggtgttataacaaaaacaagacaaaataacaacaaccaaaagtcacacaaaacaaaacctgtctgggaccaagaagaaaaagtaccaatggtcatgcacctcaccttctctaggacattctagaaattcactggacatcagtacctcatggagaggcttctcggacaaactgtccagttagacagggggcttatgtctggtcactaccaaaaatgaagcaacagagaatcctaattaaagaaagcattaaataacattttccttctttgaagcttaaaacttcttgatgtttttaaaggtaagcttttctttcccactttattccgtgatatttatccaagtatctgaagacagatcagagtggtcagtaaaaacttaaaaaataaaaatctagcttcataatttccaaatacttttggcaattggatttagcttaatgcagtgttgctgtatgtagattctgccttagcaaaaaaaagaaaaaacacacaacttggtaattaatttttacacattgtatccagagatgcttcaaaagttttagaaaatattttttgttccctgaagtaaggaaaacacacaccccctcccacccccatgcaacctcttattctaatttgcattattgatgttctcaacaaacctctctttccttgggttaactttaatacagtccttgttagaattctcatggatcataaatcagtgggatccaagtaaggccctattagttctacttataagacatttaccatgctgggcgcagtggctcatacatgtaatcccggcactttgggaggctgaggcgggtggatcacttaaggtcaggagttccagaccagcctggccaacatggtgaaaccccgtccctattaaaaatacaaaaattagctgggtgtggtggcacacacctgtaatcccagctacctgggacactgaggcaggagaatcacttgaacccaggaggcggaagttgcagtgagccgagattgcaccagtgtgcaacagcctgggtgacagagtgagacttggtctcaaaaaaaaaaaaaaaaaaagacatttacctgaaaggtaaagtcctgcttctggatctctttagaagcacaaaataagtttctggatttgcaggaccttatttcccttcatgaactcgttaagcaaaaacacaggtacctcactttgggttggacttggcatcctgatagagcataattacgtcttaggaaaagtcaaatcagagaacaagggttagtgaataatgggtaaaaggaatgattatgaaccaagagaatgagctaaccattgatctttctccatctgtgcactgagatcctcctaggagcccttacagtttataaatcaatcttttcatgatttaatgacaatcttggagaaagatcaccatcagtctgcagaggagaagatctttctagcattaataaacagtgatctggtaaacccaaatcagatgaaattattgacactcacaaactagttgttttccaagcgtccctggggtgtggataaagactttggaggagctatttcatggtaaaaggactgttttggtcctgaaggttccagtggcaaagcccttatgagaactgggggattctagactttattccaggatggactaccatggacctactcatatgaaggctcaggatttactcaatattggaagagaaggaaaggaaaggaggaagaggaagaagaaacaaaatagttcttagtgattcaacacctaccatgtactagtatagcacactcatcactcatttttattagttccaatgacaaacctataaggtagactttattcttctacagatcagaaaacagattcattgactttccccaggccatatatttattcagctaatatttattatgtatgtgttttaggtgctggatgaacaatggtggacaaggcaaaaactctacctttggggagcttacattttaattaaataatttttgaacactttgttgactataactcacaataagaaacattaaactatcgcaatatgtacatcttataaacaaacacacatatatatttgaaacaaaatgtttacatacatagactcgtccttactgcatgtgatgcatgcttttatattttcttttctattttatgtctcttttaaagccaattaaattgattttgttatcaactaatgaatcataatctaaaatttgaaaacattgtcttagttgacttgaatagaataggaatagtattgatattaatcaatatcaagaattccaaagttattttgataattccaaagcctggggaggtatcttcatctttttcagtgcacagtttaatggcctagaaaaggaagatgagaagtgggaggagagctgtctgtttcttcacagcctggagttgtttggtggatgtcatttaacttcagtctggatttgccaggatgctcaaactccatctcttcttcatagtgtgtcttctgtttgctcccagcaataataatgtgtttcattttcctctaacctttgttcttcctgcataggctaacaacagaatatccaggtcactatggtgaggaaatggacatgatttcctacaattatgattactatatccgaggagcaacaaccactttctctgcagtggaaaggtgagaaagacagccccttcccaatgggctagggttaaaggagttgggactaactccctgcaaggattttacctgcaggaatttataaacacaaacacacacacacacacacacacacacacacacgtagaatacaagtgaaaatttcttacatgcacatatatttctgcaggaactttgacctgaggttttacttatcttagtttcctacctggtcaaggattaactgcagttttggctggaaaatgggaggcagtgggaagtgagctgttctcatgagctcacctcatggagctgctcaccttgcaagtgagggtggattccagcctgctcaagagcagagagtcctaaactcggtatcccttgatggtctaagcttttcccctcactcaatttcaaagagcacttttcctcatgaaacaccaagaggagaaggcaaatatgcttagaggagtgcccattgtcaaaatggacccccttccaccccgtgcctctatatcatccccactttgggttttaggaaagaagagagaagagaaagaaaagggattggagataagaaacacacagaacctactgtcttagtctgggctgctataccacattaccttagactgggtaacttacgaacaatagaaatttattttcacagttctggaagctggaaagtccaagatcaaggtgccagcaggttcagtgtctggtgaggggttgctcgctgcttcagagatgttgctttattactgtgtcctcacgcatggtggaaagggcaagccagctcccttcaacttattttatatgggcactaatcccattcatgagagcagagccctcatggcttaatcacccccctaaaggctcctcctcctaatactatcacattgagtattaggttccaatatataaattttaaggggacaccaacattcagaccatagcatctaccaaccatatttagaaatgaaaggagttaacaatccctcagtaaacctgcaaaaattaatgaaagaagagaatttaaatggcctaaagataaaaacagcactaacacttttttcatcacctttctctcacaatcaactccttaatcctatctcaaatacatcaaaacggtaagaagaaaacaagaattgtactccctattaatatagagaaatgtgtgggtaaattcaggtgttaatgattggtttggcctacttttagtcagccgataatcactttacacagaaatgaattcctgaaaagttaccaataaatattttgcaaaccaaataacacttacattaactcattagatagtatgctatgatgaatttgagtgtgacacatctttggtgtgtgtctgtgttttcaaacagaattacatcttaaataaagtgaacttatttaatatgacctagaatttcttttttttttttaaaaaaaaaaaagacattaagtagctctggaaaggcacaatatatgttgcaggctgatcagcaaaaacctttatgtttacccataggcaaaccactcagtttgcacacattacttatttttactttagatacactttaaactagcttagttaccaattttctagaagcagcaaattagaaagggaaacgagtatatactacttagaatgaaactcattccaccaatgagaataaatagctggatgacatgataacaaatatgcttaagaaaaataaagaaaatgaaaggctcaagaactcaaagaacatgggttgtcatttagcagggccatgctccccaaagtgcaaaacgaaataacaggggtgctcaatgctccaaatgatgacttcagctcaacaagaaaattagttctatgttccctgtttaagaaagcaggaattaatacagtaaaggaagagtgccatccaagattagtatgaaataaatatatctgagtagttaaaatgctcaattcagttttcagtaaattcactttttagtaaatttttcggttatgtggattacccagaatcatgaaaaactgaaatattatgtcattgcattaatttaaaatgagtatcctccccccaaaataaaataaaataaatatactcatgcaactttgctactgtcatcaaaaataagtagcttaatgatccacaacttgggtttcttctcctctgctgaaagatgctgaggtccccagcttggagaactattgtcagggcaggactccttgtgcaagagctttccctccacatgcaaatcatagtggtttcctcttagaatgctgttgttccatctatgcgctattgacatctagggccagatatttctttgtttcagggtctgtcctttgcattctagatgtttagtctacccactagatgccattagcaccccaccctaaccaaaagaagttgcagacattgccaagtattcccttggggagcaaatttgcccccactgtcctggtgtgaaatcagagactgaacctggtggaatcatttggtcttcataagaccaagtctaagttttgctcagcatcaattaatagccttctaaaagagtagtttgaatgcctgatcataagatcttgtttatctgtgtttgttgctacacagataaataagacctggctgcagtaattacagacatttggtaaacccacaggccaccaattttctaatttccttctaaaacaatctatgacctcttttgacaattgcaggaatcaaaatatcacccaggccctggtatcacccagaccctcaagttgatcacccagatttgtgttgagggactctatacccaattgttctaaacaaacgacccggagcaacagactcagaattagaaagcctgccttaagctgtttgagcagagtgagccctgcttcctaggactaagagcaatcagccccacttttcagtttagaagctggatggaggccttgttagtcatagtgtttaggataaattgttgaaaagagggcttgcagattgaaaagggagatagataattctgagtttgtaaaggaccccaccaagctttggaatgatttgcataattaaatatggaaaaactcttcgtttttgccctttatcaggactgtgcaaagggcatggcagccacgtgttcttctgggcttaagattacctagttaggcagactgtgtggtttaagagaaagaccaagatttgagtacaataaactgcgaatctgaaattgtcacctattacttgtattaccttaaagcaagttaattatttctctgagcctggtttttcacctaaacaatgaatcgttgtgaggattaaaagagaaaacacgtaaagcatctggtgcaatgccagatatattagaggctacaattatcattatcactgttcaacagtattagaccacaggagtgtcatgcaatgtaggcactcaaaacatttctcttaaatggatgaataaagaacataaattcaccctgagcaaagaacattccttgaaatgtatccacaccacatttttcaaaatttagtaatgctatgtacactcttcccatccccaaccacttaaacacataggcaattcataacaattcttgtgatgccagaatggcagccattttcttttttaatttaagggactttttcattcctctgtagcagtgttttctgaagggaaacacatgtatagcacagagcccagtgcatggtgagcactcagcatatgttaagtgctcagaaagagtcagtgggaaaatggacggactttttaaaacaagatttttttcttttttttgagacagggtttcactctgtcacccaggctggagtgcagtggcaccatctcggttcactgcagcttcaacctcccggactccagcaatcctcccacctcagcctcccaagtagctgggactacaggcatgcaccaccacacccagctaattttttgtatttttttgtggagtcagggtttccacatattggccagactggtctcaaactcctagcctcaagcaatccacctgcctcagcctcccaaaatgctaggattgcaggtgtgagctaccaagcccagcctaaaacaagattctttacaatgaaatggagatgatgttaaataaatgcttttattccaagctgttaacccacaggtccttgaggtactttctggaggcagcaggggtgagctgaccaccagtgatgaacagaggcctccacacagccagtgacctaattagtcaccttcaagggtgacctgaactcacagatttgtcggttcttgggaaactgcataaagatgtcttctaagagcaaagtgaggttaagtgtcccttcagttcccagatcctccaaatgttctctgctgctgtttccccagcagcgattcttcctgccatgtcctttctcactgacattcattttctgactctccctcccacagggatcgccagtggaagttcataatgtgccggatgactgaatacgactgtgaatttgcaaatgtttagatttgccacataccaaatctgggtgaaaggaaaggggccaggggacaggagggtgtccacatatgttaacatcagttggatctcctatagaagtttctgctgctctctttccttctccctgagctggtaactgcaatgccaacttcctgggcctttctgactagtatcacacttctaataaaatccacaattaaaccatgtttctcacttttcacatgtttcatagcaactgctttatatgactgatgatggcttccttgcacaccacatatacagtgcgcatgcttacagccgggcttctggagcaccagctgcagcctggctactgctttttactgcagaatgaactgcaagttcagcatagtggaggggagaggcagaactggaggagaggtgcagtgaaggttctctacagctaagcctgtttgaatgatacgtaggttccccaccaaaagcaggctttctgccctgagggacatcttcccactcccctgctccacatgagccatgcatgcttagcaatccaagtgcagagctctttgctccaggagtgaggagactgggaggtgaaatggggaaatggaagggtttggaggcagagctgaaaacagggttggaaggatttcctgaattagaagacaaacgttagcatacccagtaaggaaaatgagtgcaggggccaggggaacccgtgaggatcactctcaaatgagattaaaaacaaggaagcagagaatggtcagagaatgggattcagattgggaacttgtggggatgagagtgaccaggttgaactgggaagtggaaaaaggagtttgagtcactggcacctagaagcctgcccacgattcctaggaaggctggcagacaccctggaaccctggggagctactggcaaactctcctggattgggcctgatttttttggtgggaaaggctgccctggggatcaactttccttctgtgtgtggccaggagttcttctgcagagatggcgctatctttcctcctcctgtgatgtcctgctcccaaccatttgtactcttcattacaaaagaaataaaaatattaacgttcactatgctgaaaatattcagggtcagtttttgctctctactctttcccttgctgattatttatccattcattctgaaaatcctggttagcattgtggtttgtgccaagcaccatgcagaccccaggaataaaatgatgacaatgacagagtgtggtgggggaatcagatatttaagacataaagtgctaaatgctttacttaagattaaacaaaggaaggaatcacatttcttggcctttgagttcagcctaatcttttttcagcatccttcaaccttcctcatcccaagatgtcacatgaatttttaaccacaggaagtccctcttttctttatccacagcagattgccttttttttttttttctgatccatgctgctcttccctcatcctctctcccagtggacccagaagaagagccagccaggcaaaaccacagggatcgcgtaccctgccatacaccccctctaggtggtcaagaaggtgactctcagccagtggtgatggtatttcccacggcaagatcccagcattgtgatggggaaggcagggctaaggatatcttctcctgccttaactcctaaaacactttttcatattagagctttgctttatttcctccatgtcattgtttctgactctctggcaattttaatttataataagatgcttcggtgttatttttcacaaagggagccattaatattttagcaatttcagcctggttcaggatggaaaccaggaaatagccttagttgggtatgtggagcacagcaggaaaggagacaagcaatgctgattggctgacttggcatccatgaagaaagcaaatggctggtgagaggatggggagctgggagggtgcagggagcatggctgggggaggagaggctgcagctgggagtagccaggagactgcaagaggacataagtcaagaaaaaaaacttctttaaagcaattcaataaatagtgcctgtgccaagtggaataaaaggagtttctactaagaagaaaactattatttgcacgtagataggccaaggacaatgacagaaaagacattgtcaacttggtttgaatctgaataattatactttatgttataggtctttcaataagaactaagtgtcagagtgaatactaaatcccagatctggtaactgcaagttttgttctctgttttttcattactccaaactttctactaacttgctccacagtcttggataagtcacctctcctttctaggcctactgtttaaaatgaggacatttatctaggtaaccattgtggtttctcgcaattctaagaatctctgaactctatcacctcctgaattgtttataaagggattttctaaggcattttcttccaggaaaggagcctggaactaaagatgataacctagggcctaccgctggctctgacagagggtggctgtgtaagattagagaaatccccaagcccccttcccctcatctgcccagtacaggtaggaattcctttctaaacaactttacaagatgctggccacatacaatgagataatagaaagaggagatacatgattcctgcctcacaaggccttcagcctaatggtgagatgagaagatagatgatgacaataactgcaagaaagtttcctgaggaagccgagtctatgtttggccctgaaggacaagtaggacttctgaggtgagtagaaaagactgtaagctctggcgtcagacttcctggacacaaatcatggtcctgtcacttcccagctttatgaccttggccacgtcacctacctttcctgagactctatttccttacctgtagaaatatagtacttacaacacagggttactgtaagaattaaatgagatcacatagtgtcttgcatataataagtacccaataaatgtagtcagagaaggaaaacagtgtcagtatatattggaaataaaattccttaggtaagccggattttagtaaacgtcaataataggaaacatttatcaagcaaacttaagtcccacttacatttgctcagtaactgaatcaataaattatcaagtgtttattatataccaaccattttactaggcacagttcctgcattctggagaattataaactaaaggagttagtcaagcaaacaaaccgtgacagtacagtttgataagtcaagggcaggcggcatttcaatagaaggcggtgagaggtcaggataggaaaggggatggtagaatttaaggcaatggaaatgatattatggaaggcaaaaaataaggtatgcatttgagaaaggttctccaggaaatactggccttaccaagggggcctgggaggtccaacatacagtcatattgttctaaagagagattggtttctcacatcagtaccataaggcattccacaatttggtcatgttagtagtaacttattctatctatctggaactcagatggcctggagaagttctctctccatcctggcccttcatccatatatatgtcttcatgcttgattgctttaacccaaacatgaaactcaacacttttgtaagttccttcagaaaaattcattctcacaaaagcattagtgctcacaaatgcttaaacagatctgggatttagtccccacaaactcaaaaacaacaacaacaacagattctgcatatttctgtctttataaatgttcttgttcaccgggaaatcaaggatttccatctctctagctggtcccccagctagctccaagcctacttggttcttctcttattaatcagagaaaatgtttctcaatatagtccatgaccaaacagttgtgcacatcacggtggccaatagaacagagatcacatagtcaatagcatccactctccttttaaagtctcagtcagttttaattaaaccacttctgtttaatcgaaccacattattaagcagtgctatctgaacctggttaccatcctgagatccagaattggtgagactggataggcagaacccttgacaaaatgttgcctagacatacttgggcatagcatccctttcctactaacttgttgaatctctgttattaaatgcattcctttataaagcaagaattaaaaaacacacgtaccttaaaatttatggtaagaaataataacatattcatgcatatctcagattttcatatcccacccatatctcaatttttcatagaatgaaatatttctaaaaagtcaaaaccaaccaaaaatccctattaattttaaaacctattcattagatgccactgtgtcttgctaagcacttgaatctacctttgtgtgaccttcttcttcctctcacaccaatgcaggcctatttatccataagaagcccagttataaatgtgaatgaatgactgtatcagtgaaaaatgctcaatagaaatattgcaaaatgcaaattatgaatttgcattgtagcattttttattcctttgttcttctatatacttttctgccttccccaacttataaaaataattatcattgattgtatttataatcaaaaaagaaaagtaattttaatcttataaaacaaaaaaagtcaccggcttccaggcagttcagtcctaggacaatgtttcagctgaaaggtgaccatatggttacttcatggaaagaaagagattatgaagccaggccctttcatctaaccggccgcctaatgggttataatttaatatgcagaattacctgctctttccaaggtctctaaccatccccagagacaatggaacagatgtgcagcctgtcataaggccaatgtgaaactaacatttacagcagaagctggaaatcttctccccacgtcttccacgcatggaagtcctacttcagggccaagtataaattcagcttccccaggaaacttccctgagccttccaagactggggctcttcactccctcagcattctgtgtctttatcttcatgtccctgaggacaggagtctcatttccgtttgttcattggtaaatttcccatgcctagctaagtgtttcacacataatgggcatccaagacatgtatttttaaactaatctggatttctggttggtttcaatagatcgatcaacactctaagcaaccaaaaactgaaaaaacactttgaaaattatgaaattctattaacaggcaaggtattatgatggtactgtggttctgatggaggttaataccactcttactctctttattcatcattattgggtaatcattcatttaatccctttaagagctattcactaatgataagtgagttggaaagtataacatacgatcacaatgatcacttacacattcagaaagtgtattttaccatcctgggtaacataacaattttggtgtttttatgaactgtgaactgtatcaaaatcaacacgtgagcagctagcacagtactaggcacttggcagaaatgagggaaagtctcactgaataactccttgggagactgggggaccaagaggcaaaggggctcaggttggtaaaatagtgtaaacctgtgaaaatttggatgctgtttttaagtctcatataagcatatgagttctaggggtggggtgggcggggatttttgtctgatatatcccccgcacctagaatagggactgacccatggtaggaattcaacaaatatttaatgaaaaaataaaagtagagccctaagacagaccctaatgcagattatgacttcattaacatagaccttatagccttttctttttcttgttactcccactgaaagtgtacctgtgggatcacctcatgattagatggaccaatgcagtgaagctggtttttcagaattaggtagctttctttttatatggctgtctagcaggcattcgtagaccctgctggtgtctggaatctgtcttctctgtgtctggtagatttcagctgacctgggtgtctctgtgggcctcttttgttggcagactcaaaggtgaactcattagccattacccccttggaaatatgttctgggaaatcaaacatgctctgagtcacatctgtctgccgcctaccacaacagtgtagtatgcagactggttctgccaataggcttctgggaggaagaaatggaaaatctgtcatggtatgaactgcacagctcaacttggagaaggacttcagtccacagaaattcacagagtgaaggcaggctcttagttctcttcatgcataggtaagcctcgagaaaattcccaggtccctgcagaggaggagaaaaaatggaaagaggtggacaagtggattgtgttgggcagggcggcgacactcagtgctttccagaacggcactttggcttgttctaaatggataatgtcacatggctatgcttttgtacacataaggttgatcgctacttcaacaaggtgccattaatcagcttccttgctcctggtacaaactgaagaaagccaagaagcataaaacacatgcctttcctcagagagattttttattctagagagggagaaaagaacaaaaaactggaaaggttaatgaataaaagaaggctgctcacaatcccacacccagtgagtaatacacaaagaaaaccttatgctattgcagagagcaaaggatcactatgagctggagaaacagaaggcattaggacaggtagaagatgaagaagacttatgccagcagcagagactgcctgagcaaacctatggaagtgaggaggctcctcaagaagccaagaaaaaccttgggtctcctgaacccaattctcaggctggagcccagtgaggcaaatgaattgcccaaggacacctatgagtaaatgttggggacacttagaattcaagcctctgggatctgagcttggttatatcctctgtcaggtccctgtccagtgagtggtttagtgaggcgaagagagagggagagaacatgcattgcaggctcttgcactctatgctcaaacaggctttcccatttgctactcgcagataccctagactggcatagttactgccattttatagataggttcaaaggtccccaaaataataggtgacttgcccaaggtcacacagctagtggaaatggatgttgaactgaagtctagctgtttacaaagcccagtcatctcagctatgtcaacttggagtcaagggtttccactgggagtaaggagagataactgctttaaactctgctttttaaataatgttcaatttgaaatagttgaataatgtccaattttaaaaaatgattcaaagatttattccagtattttaaacattgcctctggagggagagatggcactgtaaggtggtcaggaggacgttgttggaagttagaacaccagatgagttgtctgaaaataataatgttgctactcgactgttttatattactgtaaacattacccactataataaaatcagacacaggttcaacatctcctgtagtaataataactcttgtctgccttctaaaatgactcctaaataacaaaccctccataaactcaatctaacccaaataaacagaattgctgtgacaaccgagatcataattgtctttgtttgatccttcagcctccacaattgtgcaggctctccacaccgagtcatggccttgtttatctttgctgtgtgtgctctgggaagctttctgcctagagaattagcacactcaataagcatcactgttctcttcagttgattaaactccagcatactcggtctgttagcaaaatgtgttgggctgatatcacagttctagctcacctcacctcatgttgctctttttcaattttatcttagactgtgcaggttttctgcatcataaaccaaattaatcactgagatctgatagttataacagattctagacacataaattatttttcattagctttaattgcctgtaaaggaatttggacacttaatctaaggaagtgaaataatgtggttcagctctattagacaatgtaaagctctcacttattaaaaaataaaaagtgtagaaaggtaagcaaatttccagtagctgcaaccttaaggtccttccacaggaagccaatctctatggccaccaacagagctgtctttgatgttacgtgcaacttcagtccacactggcttcagtgccttcagagcaggtctctatctcctgaagatccaggtctttgattctcctatggctctaaatatatataccaaataataatgatgactacaattaattatttttgtgcatactctgagccacgctctttacttaacctttatatgcacctcatatgaatactcaagtagatttccaaagtggctatcattatccttattttacaaaggataagactgacacagagggattgaattcctttctcagggacataacagtacacactgaagcagaactcagactcaggcctggatgagtccagagcctgtgcattccaggatattctgtgctctcctgagactccaatatagactgtgccatgctgcctcctataggagtaacagccgctcctggcgtgttttctctcaccacctagggctcagccagcatgaacaccacgtcaacttaacatgaaagctaacttcaaacattgagtctagtaggtcctttcctggtacacatggttcatgactgtatccccagtacctcacagagtacctagtacattgttgatgctcagtcacaaatatatgtttgttataaataaataaacccaataaataataaataaataaaatataaatatatatacaacatatgaatggaataaactcactaagtgaacatttttggagtgaatgaatgacttagttgattattcttggtagatgctctaagtggcagtcccttcattcacctgttcttcccccagactcttcattcgtagtctttcaatccatattctttcactgttgctttcattcccatatccccaaacatttacactatctgtgaccttagaacttataccccatggctctaaaaaaatgaaaaagtatgaccacacatattccattttttcatagactcatgcctgacctcctcaccttaactgaaccctggctttccctgcagtcctcttgagtgagggtcatgcattcacataggctctgagtcctgtggaatctctagaataattttcacctcctaagtaattcttgaatttgagccctttcatctattctccaactgtctcctttattcagatccttatccttgctttcctgtctcctttggtctatgcttttctttaggaagtccatttaattgctggagggagatttttccaaaacataaatccaataggttgtatccccacttaaaatttttcctaaacactttccaagcaaaccacatagtctttcagtggcatagcacccttcacacacaccgccaggttcctgtgctccagatatgcagaattagtcacgtttccctgaagagaccatgtgtccctatgcctctgtgcctgttcacatacaatttcccatgcttggatgcctctgtacctgtaccttctttccctggaggactttcagtggtgtgtttcctggtttccaaggtgagttaatagttcctcactggtgctgccatatacctgattatacctacgtcatagcacttgtcacatttctgcatttttttctattttcacagtaactaaatgttctcattgtctcttcatacccagtgcccagcatatggtaggtgttcattaactattaactatataaatatttaaagaatgaaaggagagtcttctgacactaggcagtctacagttccatggaaaataaccacaagtagaactcatcatctctattccagactactgcaatggctttctacctaatgtagctgtctttgttcttgctgtccccttcaaattccacttacacacaaatgccagagtgatctaacatggaaat

SEQ ID NO: 143 - DNA, 717 bp, Homo sapiens
gggagcatggacctcagtcttctctgggtacttatgcccctagtcaccatggcctggggccagtatggcgattatggatacccataccagcagtatcatgactacagcgatgatgggtgggtgaatttgaatcggcaaggcttcagctaccagtgtccccaggggcaggtgatagtggccgtgaggagcatcttcagtaagaaggaaggttctgacagacaatggaactacgcctgcatgcccacgccacagagcctcggggaacccacggagtgctggtgggaggagatcaacagggctggcatggaatggtaccagacgtgctccaacaatgggctggtggcaggattccagagccgctacttcgagtcagtgctggatcgggagtggcagttttactgttgtcgctacagcaagaggtgcccatattcctgctggctaacaacagaatatccaggtcactatggtgaggaaatggacatgatttcctacaattatgattactatatccgaggagcaacaaccactttctctgcagtggaaagggatcgccagtggaagttcataatgtgccggatgactgaatacgactgtgaatttgcaaatgtttagatttgccacataccaaatctgggtgaaaggaaaggggccctccagctttccactgcagagaaagtggttgttgctcctcggtatatgtaatcataattgtagatc

SEQ ID NO: 144 - DNA, 606 bp, Homo sapiens
atggacctcagtcttctctgggtacttatgcccctagtcaccatggcctggggccagtatggcgattatggatacccataccagcagtatcatgactacagcgatgatgggtgggtgaatttgaatcggcaaggcttcagctaccagtgtccccaggggcaggtgatagtggccgtgaggagcatcttcagtaagaaggaaggttctgacagacaatggaactacgcctgcatgcccacgccacagagcctcggggaacccacggagtgctggtgggaggagatcaacagggctggcatggaatggtaccagacgtgctccaacaatgggctggtggcaggattccagagccgctacttcgagtcagtgctggatcgggagtggcagttttactgttgtcgctacagcaagaggtgcccatattcctgctggctaacaacagaatatccaggtcactatggtgaggaaatggacatgatttcctacaattatgattactatatccgaggagcaacaaccactttctctgcagtggaaagggatcgccagtggaagttcataatgtgccggatgactgaatacgactgtgaatttgcaaatgtttag

SEQ ID NO: 145 - DNA, 22055 bp, Mus musculus
  misc_feature (12157)..(12460): "n" at positions 12157 through 12460 can be any base.
gtagcaaagagaggggaagccataatcagaatatatcttatgaaaaagggtatcctcaataaaacaaaaatagaaaacaaatctattttcagtaaaaattatggactcctattgtgttatttcttattcttttttttttctctttattttcctcgaatgcatatgaagatacaagctgggcttagtgacacaggcttatgactcctgctattgagcccacaaaggcaggaggatcacagacttttattcagcctgagaactgagtgaaactcttcttcaaaggtaaatagtaaaatgaagaccctgctatttacctgagtatgtcagtgcttgcctggcatgtgtgagtccctgtccaactcatgaaggatgacaatattcaatcacctataacttaaattgttcattgtaaaataatttataataaaaagaaaagaagtatggtcaaagaagccatttatggttttttttcattttttttatttgatattttctgtatatacatttcaaatttcaaatgctatcctgaaagttccctataccctcccccagccctgctcccctatccacccactccagcttcttggccctggcattcccctgtactggggcagagaggtagatcaatagaatataattgaagacccagaaatgaattcacacacctatggtcacttgatctttgacaagagagctaaaaccatccagtggaaaaaagacagcattttcaacaaatggtgctggcacaactggtggctatcatgtagaagaatgcaaatttatccattcttatctccttgtacaaagctcaagtctaagtggatcaaagacctccacataaaaccagggacactgaaattaattgaggagaaagtggggaaaagcctcgaagatatggtcacagaggaataattcctaaacagctatgtatgtttttttatctcctaccaaaaggtacattttcaaaagtacagagttaagctgacgtgaggaagctgtttgagtaaacatgaagattctgagactgaaacataacctttggttttcctgagttatcggcatttaatattatatagggcttcccctaaaataaaaattaacaatgtgcaacaccattataaaatatgtaattgtagttgttttcctagcattacagctaacatgatacaatatggaaccggtccaggttcaatgtgtgagttagaaatcaattggagttggcacaattttctgataaggactttattggctccaataatggcacaggtcatgagaaaggcacaaagactgcctgtgactgccccaattccagcaatcaatgtcaacatcccagttctttactaactttgcttattggtctcagagatttaaagtctatcacttaatttattttacatggagcatatagcctgattaccttacaatgatatgagaagtctaaagtaacaccctggacataaggttactgtgtatcaaagcagggtgattttactggccaaggttcaataaaaaccagctcaaggctatttttgacgtgaggccttatacaacatcttccagtaactctccagatatgccatgcttggaacaagaatactgggctcttgataaagggaccatttcccactcatattttaaatgtaacaacatgaagctatccacatattatttgacacaggagaaaagacagataaaatgtacaaaagggataatttaacttttgacagaggagacattaaaacctagtttttggttataacaagaacaaagattcctttcttgccaagaaatgaactgtaaatatcccaaggccaattcagtaagcatagaaattgaacaacttttcatgtttagctagtcagcagtgaaaccaaggtgctacactgcagttagagacattataccccaaagttttattacaagtattgtattacttcaattaaagacaaaatttaatggaggttttctttaattgtggttatatttttgagattaattatcactaggattaatgagctctcacagaggggcatgaacataaatgtcaggagaagagtcaactgtgcattttgatttatgtatatttatacatgtttttcatatatttaaattattaaatgattcaatatgttaaatgttactcatgtaattttttaattatcatcgtgataaatatgatatttatcataggaaagctctatttgttatgattgagtaggagcttgtagagtaaattagaatgttttcttaggaacattttaaacatatagtaaagtagaaaacaagtataaatgctgtcatgcctactttttggattatcaatttttaaaatttaggctatttgttttgtttctctattctcagcccaactctgtctcttttgtcttgaactatttgaaatccaaatatatcctttttaccctaagtctcttaagtgcaatatatttgaaaataagtattaaatagtattttaatcataaacatccatagtacaaaaaattttctctatatatatccatatatccttatatatctcatatattcaaatatatatttgagatccttctcatttttagacttcacacaacctctctctctctctctctcacacacacacacacacacacacacaactaaaaataagcaaaaattaagaaattctttcacataggattcttcagctagttatatattaaaataattgttttggaacaaataaatattagcaatatacatacatatatatatataaaataaggagatgaaaagattgtgtgtgtgtgtgtgtatgtgtgtgtctaagttggaggacaatgttgtatagggtggtcagttattaagatgcaattcatgtcaataggcaaactagccagtgcttttatacactgagcagttttgcacaattgcacaccttacatatccataaattaatcacaatagagaaaattgaaaaaatttcatagctaaatgttggcacatattcatagttgctcagtttatttccagaagacatcttattagatgaagctcagtaagtttccttattagatgttttcatattctttcaagtccttctggttattggttcatgtatatgtctgtgtagctttgtgtgtacctgtatgcacatggatgcagtggccattgaatagtctttggggtttttttcttaagtgtaactccatcatcaaccttgtttttctgacagggattggatagggactcacacatgctaggctagccctgaaggactcagaaaaacattcagtttccattgtactgtttacaaggtatgctgtctgaatacagaatctcagagatccaatcagactctgcctcctccttcccatcacagggcttaaaagagaacatcctcagtctagcttttgtttttaaatgtgggttctggtgatggactcaggtcttcatgactataaggcaagcaccttgttaggcaagctctcactatctagtcaggttcttttaaaattttttgttgttgttgttgttttgagacaaggtttctctatgtagccctgtctttcctggaactcactctgtagaccaggctggccttgaactcagaaatccacctgcctctgcctcctgagtactgggatcaaaggcgtgcaccaccatgcccggctggttcttttaatcttaaattttgtctttcctcagtgaacatttttagtttgtgatatattacattcgtgattcatttgctaatatatatttattcaaaaaacaattattttaatatataattatctgaagaatcctatgtgaaaaaatttcttaatttttttcttatttttagttttgtgtgtgtgtgtgtgtgtgtgtgtgtgtgtgtgtgtgtgtgtgtgtgtgtgtgtgagagtgagagtgagagagagagagagagagagagagagagagaggttgtgtgaagtctaaaaatgagaaggatctcttggagtgcttgttactgtcaattttgagctgtctaacttggatgctgggaaatgaactctgaacctttacaagatctgcttatgctcttaacttctgcacccacactctaacctgtaattatttttattctctgagaatttaatgcatatctacaatcaaatgatcacatctaccaccatttctgaactctctgtagattatctcccaaagtttatcttctactattttaaattttaaaatttctctactaagttcctgcaaagttcctgactgtattggctgtttatttatatagttctgcatttttttaaaatcaactatccagatccctccctccctccttctacctcctgtgattattttgttaccccttctatgtaggattgaagcattcacactttgtttttttctttttctttaggtttatatgatttgtgatttataccgtgagtgttttgagtgattaggctaatatccacttatcagttagtacaaaccttgtgtcttcttttgtgtctgggttaccttacataggatattttctagttccatccatttccctgtgaatttcatgaagtaggggaacggaaatacaggagggcatgatcaggtatggaaagaatcagaagagaagtacagagggtcatgaaatttaacagaaatatgtggcagtgggacatagggaactggagtagccactagtaagtcctagatcccagataaggaagtctcccaggacccaattattatgatataagctgaaatatgcaagaaaggggagagagaacctgtaaagaccacctccagtagataggcatgcctcctggttgagaaatggggccacccacccatctcaaaaattttaaaaaagaaatgttcctatacaaaagaaagacaggaacaaaaaatgaccagagactgaacgaaaggccatccagagatccagcccatccatagacactgacactattgctaatgccaagaagcacttgctgaaaggagccttgtctgactgtcccctgagaggttctgccagcatctgaatattacagatgcagtcacagtcaaccattggactgagcctgaggaccccaatggaagagctagtggaagggctcaagaagctgagggcaattgtaaccccataggaagaacagtatcatctaactggaccacccagagctcccagggactaaagcaccaaccaaatagaatacatggagggatccatggctccaactacatatgtagcaaaggatggccttatctggcatcagtgggacaggaggcccttgatcttgtgtaggcttggtctctagtgtaggggaatgctagactggtgaggcaggagtgggtaagtgggtggaggagcaacctcatagaggcaatggggagatgaaatgggatgggagtgttgtagagggaaaactgggaagggggatataatttgaaatgtaaatgaataaaatgatgaataagaatgaatttatctttttaggaaaagaatatgatgcctatacttatgattaaatgacttgaagaagttccatggacttttcagacgagtctgtaaattatgaacttaaatctcaatatcacaacagatgtctacctttattcacaaattgcattagcaataacagtatgaggatcaaattttatagacatcccagtataaccaaaccaaaccaaaataaaccaagttaaacacatgaccctcctcatttaagcacatctatatattcctatgttaccaatgaaaatgaggtggtaatttaaatcctagacaaatgaccactttgcaagagagctttttaaggaatgaaaccttttgttagatttctttggtctctattcattactctctccatctacatcatttcatttatcccccttaagtgttaagttctctggctgcctcttttctggccattttgccattattccattattcaacagagacagcatacttgactcagaaagcatgcttggctcatcaggcctgctcaaaaccttagtttcttatataaccttaaatgttggtactaattctaatttatttgcccaactatacttatgacacagaattctacataaaaatattacagggctataatcatattaaattaaatatgctcctgagataatctagaagcaatttatttttatatgagttttgaatatctagtgtaagaattgatgtcctggatagataaacaataaggaaggtgctaaggaaaaatattcttcctgaacttggaaaagctgacatgctcactggaaagaggaagcattcttaacaagccaaacccaagggtcatataaattttctggaagcaatgacaaaccctacccatgaccttatcgtatgcatccctgtcatgcacataagtgccctttccttaatactcttatgaaatcacaatatctattttctgacactaccaatagttacaatggacagattcaagggagatgaggaaatttgaaagtcctagaagagggtctagcatctgtggtagaggattcaagtggtgtctttatcagagaacaggaatagtctccattagttctccaactactactttctatctcgaacataatagttctgtaacaacaattgctaatataggatttctcagtggaagcagagaatgtaaatactctaggaatacaagggaaattaaaatgagctggagagtaagaagaagtagattaaacacaggcagtaggcaagaggtagtgggaagtttgaatatcttctttatgattatattccttttagtgtcttcgattgcttccttacagctatgatactgaatcctatgcatcccagcatgtttttcaatgctgcttttctgaattatacttctatgtcaggggcaaaattaggtttctccgttggcatcactgatctccataagaatgctcagagtaggggaacattcttaagatgctcatatggtaatgataagaaatgttccatgcaggaaatctccctgcaagtctatcatccagccttcttctaggtccactatcaatgtgaactagcatagtggcccatcaccagaaacttctcatgtaatccgtagatagtttgaagtgacccagtgtgaaaaggtgaaacagaaatgccagtgtagcaacatttatctctagaatgaggtagaagagggaaatgtaaaataaaaagactttcttatgaagtaagcctatttaatgaataagaatacctgagagagaaataataagatatggtcaagatttgagacacaatcccaaaatacaaaacccataaatgttttctaaacttacattttcaacaaatgtccactttcctttagaccattcctattcttttctcccatcaccctaggtgaactctaagaaggaactgtcttcttcatacatcagctgcaccagtgatccccaggcctacggctaacaccattatgctttgtttagggagctctgtgggtactggttagttcatattgttgttcctcctatggggctgcaaaacccttcagctccttgggtactttctctaactccttcattggggaccctgtgcttcatccaatggatcatttatttttatttttgtgctaaactttcactcaaatctgtgttttgaagttgttaaataaatatcttatgaacttcatataaagttagaatcatttgtttcattttgatttcaatatttatgggtagctttaaaatctccaaaatttggttttgtatatttaaaataacaaatgaaatatccatgtatgtatatacatattcatatggttatcttttttcatctacccagtatcttttctatttgactgtactggatacatatatatatccattgtttgccataaatctttttaaattatactttggaataattttaaattataaaatttgtgagaatttcaggttatttgtggagagagtccctttcatggttttacagtcactgttacattgtacagctagggtcaattctggaccttctagtacaccttcacaacatactatgttcattttagtttaattaacaatttctttagtcaatttatgtcttgacaacagccctccccttctcctagtcctacccttactaatacattacctcatgagtccttcacttctcttcagaaaccaggaacaccttgagcatcaatttgtcctaggatggaaatttcccatggaataagttcctttgggccagttattggttgggcgtttcctcaagctctgctccatgtttatccctgcacatatggaaggcaggacaagttttgaattgaacattttgtggatggtttaatgttccctccctccacttgcagtcccccctggctataggaggaggccacttcagtttccatacacccaactattatgtttctcagtgagggttaaccccatatactcctaggaatctccttatcttcccgggtctcgagatagttccagagatgcccctgccccaatttgtattctttctcccagccctctctgctccccctctccaaacctaatcccaatccccgttcaccttcttacctcaactcccaactagatccttccctccaacaacctccaatgactattttgtttcctgttctgagcgacattcaagcatcttctcttgggccctccttattactcaatttctttgagtctgtggattgtagcatgattatcctgaactttatgtctaatgtccacaaataagtgtgtacacactatacatgtctttctggtctgcgttacctcactcaggttgataatctcaacttccatccacgtgcctacaaattttatgatgtctttctttttgatagctgaatagtattccattttgtaaaagtgtgtagaaaatataccacattttctttatacattcttttgtgagggacattgaggttgtttccagtttctggttattacaattaaagttgctatgaatgtagttgagcatgtgtccttgtggtatggtgaggtatctttgaggtctatgcccaggagtggcatagatggatagaactattcttaatgttttgccaaattgatttccaaagtgattatacaaatttgcacccttaccagcaaaccagtagtcttccccttttctacatttttgccagcacgtgctgtcacttgaggttttgatcttctacagacactaagagaacacaaatgccagcccaggatactatatccagccaaactttcaattaccataaatggagaaaccaaagtattccatgacaaaaccaaattcacacattatctttccatgaatccagcccttcaaaggataataacagaaaaaaaagaaaaacaatacaaggacaaaaaccaaaccctagaaaaagcaagaaagtaatccctcaacaaaccaaaaagaagacagccacaaaaacagaatgccaactctaaaaacaaaaataatacgaagcaacaattacttttccttaatatctcttaatatcaatggactcaattccccaataaaaagaatttatcacttttaatcaattaacttacacctacaatttttaatctgctcagttcttactaatttttagacttccagatgaatattaagaaatctctatacaagtgaggtttttccaaattgattctaagtacactcatatttatttttcttaactaaatagttttatcttccttaactgatgggtaataatactttacaaactatgtcatagcataatttgtgccccaatgttgccattgtttgcttatgcttcccagaacagagtgtctggaagagggtgtggatggttcaaacttcactcacacctgaggtaaagcaggtcggctaacgggaaagaggtaatgtttatgagaattcttagttcttatcagaagagtagcctgttctttcttggaaactctttgagtctgtgccaaatgctgcccaccatccttaactggatcaatgttccagttatttactacgatgtccctccctcaaattctgttataaaaacacagtcatctctgtcctgacacaccatccagatctctggaagacaggtaagggtgaactgaaagatgctgaaaggtaggcatgggttcttctctcacacacaggacaggtgtctgtgtcctcagacaacacagagttttgtaacttgaggtatttaggaagttctcagggagaggaaaaaacatcaatttccacttaattcctgtatcacaggagaaagacaggatgatataattttcccttgagagttaatcaaagaaggggagggacggttctctctgaatgtcctcactaaccacacaacctagagttattctggctattcctccctcacagacaagatgctgcctccaacagcctgctccgtcatgtcctggatgctgctctcctgcctgatgctcttatctcaggttcaaggtaagacctctctgcatgtagcaatgatcccttgaaagtgtttcaagataggaaagtttcatgttgtaattaggaggaaaaattcacacaagtaaactgcctgcaactttccagcctttcttcaggtcattagttatagaagatatcagacgggtcatctctgtggaaagacaagatttctcatgttgtcagaattttgtaatttattcttccaagattaaaggggaaaatatgatggttaatatgaactgtatagaagaggaaagatggacaggtgtatttaagcctctctgcccagtgttggtagagtcatgaactaatgtgtagaaaagaagagaaaaatgatgctatcccatttactatgtctgttcatcataattttttccaaagactattagaaagcttgatattgattttcttccaaaagataatctacaaaaatattcctactttaacctttcatctaaatctcactactcatctcaccccatcgctctatttatctcactccaccccaggtgaagactccctgaagaatataccctccgcacgcattagttgccccaagggctcccaggcttatggctcctactgctatgccttgtttcagataccacagacctggtttgatgcagaagtaagtgctgggaaggagaaggtacacaaggaacacacggaaatgttaggttctatcctccctaattccttccatctgagaatagctgactttaaaaataacctctcctcttgcttacctatgtcttccagtgaagtctaaatctccttttcattttgattctcacatagctggcctgccaaaagaggcctggaggacacctcgtatctgtgctcaatagcgctgaggcttcattcttgtcctccatggtgaagagaacaggaaacagctaccaatacacttggattgggctccatgaccccactctggtatggtaacctcttctctgtttcctctcaatgatcgtatcatgggggaatacattatctatgcgtccccagagtgaacctggaaagacagagatcagaccccgcatgatattgggaccagggaaaccatcaggagcagttgtcaagctgagctctatgaatgtcttagacttcagatgaagtttatgtgttaattattgacttttacagaggtctatgtgaggatttggaattattctcatttagtttcagggagcaaacacacaaccagtcaagaggcacagaaataaagaggcaatttacattttctcttaatagaataaccaccttccttccattttaaaggaaattgctgatttagcactatttatattttgaatacatttcaggggatattaattccatcagtagtttctgtgtttataaatagacatgaagacaagaataatttctattggtgtgctcttgaaagctgcatatgatcacccaagttctgggaggctgggagggaatgaagggtttcattcacagttgcacacatgcagagctttggacccttcctttcatctgcatacttcctcactagggtgcagaacccaatggaggtggatgggaatggagtaacaatgacgtgatgaattactttaactgggagaggaacccatctactgccttagaccgtgctttctgtggcagcttgtcaagagcttctggtaagaaggagaagatctgtgtagcctaaatgcatgcccctcttctcacatccctgggtgcctctgacctaggaaattgaatgtgttcttgctttctctcatnnnnnnnnnnnnnnnnnnnnnnnnnnnnnnnnnnnnnnnnnnnnnnnnnnnnnnnnnnnnnnnnnnnnnnnnnnnnnnnnnnnnnnnnnnnnnnnnnnnnnnnnnnnnnnnnnnnnnnnnnnnnnnnnnnnnnnnnnnnnnnnnnnnnnnnnnnnnnnnnnnnnnnnnnnnnnnnnnnnnnnnnnnnnnnnnnnnnnnnnnnnnnnnnnnnnnnnnnnnnnnnnnnnnnnnnnnnnnnnnnnnnnnnnnnnnnnnnnnnnnnnnnnnnnnnnnnnnnnnnnnnnnnnnnnnnnnnnnnnnnnnnatctgctctttccatatctgtctttagtccttttggtataagtttgggctcaattctaaaataaaaataagctttctgtcacactttgagtttttgcattctattaatattattgtctgtgaatgcatgtgagcatgtatgaatgtaacagaattcttatggagatcagaggataacttattggaatcagttgttgctatctatctattgagaaagggactctcatatttttgctacaaagtaaattaagaagaatttgttgatggcataatccacctagcatccacctaattttaagtaagttccctgagagcaaatcaactctatttctggcttaagaaacaaatttttgatccatcaatccaatgtgctagcactgtgcataatttttaattgaattctttttcatgcaaagtattttgattatagttttccagagtattcttacaagtgtagaaacacaagctgttgaactccatagtggttcaaatacagttagaataatggaaataagcacaactattaaagaaacatctttattttcaacaaatttcaaataatgttttatgtacaaccatcagaacatattataaattgcttttgatagctcatgtaaatatcatgatcataagatcaaactcagatgtgttgtggaccacagtataatgtaagatctttaaatatgattgtgctgagaagtgtatacaagaaggctaactagaggtatccagtacttgcctgcttgtctacaaggcagaatcaagatgagtcctgattgttgaaactgaaatttaccagtagacagaatgacagttagaaaaacagagacttcatcccagtgaatctgaggaggaaatagtgtccaaagaactgagtaagtagcatcaaggaagaatgaaatgagggactgggtcttcctttaatggttagttatattgttaatgtgccgcagtgtggaatcaagtatgaggagagtctctatgaggaataagttacctcaggctggtctgtgggagtatctgtgggagattgtcttgatagttaattgatatattaagacccatcccatttcatttggcatcattctttaagtaagtacacctaaacgttttagctgagcacaaggtagcaggcacactttcatttctttctgctcttgaccatatggtgcaactatctgtctggagctattgctactaggtctaaatcccaatgatgaactctggctaggagcagaagctgaaataagtctcttctcaccatgctgcatttttttccaggatgttttatcacaggaataggaatgtaactagaactctggctaaagatgagacaggacagtcactgtgagccagagcttcccaggaaaaagcaaattcagaaatcgtataagtggactatggaggtgatctggcattagacaacatctttggtcccacctataaatccataggatgccgaactgggggacaacttaaggggggggtgaacttacttgagttcagagcttctgagttgaatggtatgatcagatctgatcagatcagatcactgcactgacatagagggtggctccttcagagtcattttgaccagggaaagatagacacaaatcaaccaggaattatacgttggaagaatgcaaactcccattagcaagaaaatggaacatctgctagtctaattttcttggtctaaagtactgattagtgttacttaactttgcattggagccaaatgtaagaatatcagggttatgagggaaagattgataagaacctgatccttgtcctgtcgcttcatgaatctctgaccttggaacactcaacaaagctgtcttttatgatacctgccctgggagtgtgaaacaaaacgtgaagagaatctatagggaatttcatatttatagtagctccttgatgtgtagaattccttgtgtgactgcgagctctgctcgcccagtcagtgtaggatgaactcattctcacacttagtatctttttttcttcacttctttacctttctcatgacaccatttttcccatttaaattgagattttctggttttaagaaagttcaaagctgtttatctgtacccttttggtagttacatggaagtaattatttaaacaataatttaaaaaaggttgattgttcaagtagattgcattttgctaaaaataatacttcaaagatgatatttgcagagaatggcttaagtaacatcagactctatgtgtcccaacatgaatgacatatataaacaatcagtgtgaagcgagggcaatgccttcatttgttcacattatcttccaaaagccctgtccacaagttcatcatagtatgccagtagattagccgttagacactgtttcatagaacaatggttagaactggaatctcccttagcacttccttgcggttcctttggtaactactctgcatgacttcatgtcttattgtaaaaatggagcacaatatcacaaagtattgactaaattttattattgttctccgaatccttaggccagagtccccagagaatacacttatggaagaacagcagagatgagatgaggaattcggtgtcggggtgtgagaaggactttcttggtgagccatcatgcttgctcctttgtctatgtgatcttcaggatactttcaggcagttgaaatcagaactggcctaacccttgaatttgcagacatagggaaatattgtgtcacaataataatctctccacttctgataacctgcagagagacaagaggtaaagggaatgggtctggtaaatttgtggttgtaaagaaagaacaactcaatcctctgctctggacttagacttctgcatgctcttcatttttgcatctttaagggaagaagacacagaaggaaccataagaaatgactgatcactattctacagtgcatttgccagcttatggctgtaccttggaggtcaacatagatgtggtaaatgggtttagttagagaaggcttttctctctcttacctgaggcctgagacaaagctgcacagtagccgtggtgtgcagacatggagggtggtatctcccagttatagaaggtcagagggtcagagctgctccacttccatccattttcattgggcaaactcccctgaatgtgggaagcagtgtgcagcaaaggttcattaacactgcatgaaaacgtcactgaaatacctgatttcctgcttattgtccttaaacattttatgatcatacacagttgctttggggggtagattaatatttgggaatttcttaatcctatttacaaactccattaattataggatgaaattagggttactgaaatgtatctcatctttgtaagttcaaccagtgttacatttgagagttcttcagacacgtgtggacaaaatctattctataaagaaattacagatgtaattctgacagcatttcctgacaattttatgtgcagactttctgaggctgaagaaaaattcatccaaggtctcaataataacagtaaaagtcaacaacagtgatatgaactttgtgtgaaatctcagacatctacaaagctcagctcttcagctgtagttccccttgttctaatgctacacagcactgaagatctaacacccatttggttcttcatggggagttcgaggtactcttccacagggacaaaaggcactaaggggaacaatcaaggcaaagataggaacccacaagtgacagatcatggagtccaatccagatgtatgggaatgtggtcaaactgtttttcaccagagaggacacaaagataatttcaccataagtgagcagaaatgccaggtgtcctgagaaatgcttctggcagtggatctgtgtgaagaacagaatgagagagagagactgaaaccttactagaaaatggcaaataatatgtgatggattgtatacctctcactcagctataccatagagattgaaacccagcactccttgacccacaagtattttgtcctattgctcccaactctgcctgtcttcacttacctctgcattagcccaggtctgtggttccagaatcagtaaatagcagtaggagccataagcttgggcttcttggggacagctgatgcgtggagaagacagttttttctgggattgttcacctggtttaaagggtgatatagtcagtgatggagtgaatgtgagagtggagtggagagaaggaggtcaacataaaaatgactcctcaaccttatttgagattatgactgtaatactgagtgcttcctcttagtattttcctagttgttgattttgactatgtctgcatgtgtatggggtgagcatatatgtgctgggctatacatgaggatatggacatgatgccagaggtcatttcttggtctgtatttatattggacttttaaaagggggtttcttgctggctttgtccagtttataattttgctagattggccatccagtgatacccatacaaattcctctcttgtcctcctcagaatttggattatggccacctaccaccttgtcaagtttaatttacatgggttctaggcattcaacttggcttctcatgcttgcttaacaagcacttcactagctgagatatcgtatacccaacattaggttcttaatttaacaagacattttaatgtggagaagcgtgcctttttaattttaccctgtcttcatactcatttattctcccttctctgggataacagatggagggctttatattctgtcctctgtgtccttccttagagttcattactgacctgtaagctttcttttttcaaccttccaagatagttagagtttgctgatgacacgggggaaactttcattctataacagtgaaacactgtggtatatctcccctcttccaatgatccagaggaaggaaggatgtggaagatttttctgtgtggattctcctcatacttaacacacgagactctccagattccttctctctccttggttctcaatattcatggggaacccagtgctagacacacaacaactttaccttgtacccaagaaagggacatcaggcaacacagtagcatccaggacatgctatgaagggtcttgtgagacaccatggtatatctgtgaggtaaaaggagtaagcccctgaagagagtgtggttagaagtgacataaaaggagaccacaatcactttcattattatttatatagctctgcaaggaaaaaaaatctaatttcagtctgatccccctgttttctctggttccggagaaaaatggaagggacatgctcatctttcagttcctagtttttctgagttttagagatttgccttgtgaggtcagagaaagttctccatctactactgcagtgtgggagacaaatacctgccagccttgcattgtctattagctccacttacctgtctatacagaggtctgcaatgctttgacagcacagaggtgatttcacttttaaaacgacatctgaagtagggccatgcaagtgaagaagtgccagctcctgctgctctctgtagtgggtagtgcttggcacaggttacagaagatttcccataagaatacaggactactcagggcagagagtgagaactgccacacatgttcctttcctgttaatctagctctgacctcaggtgctgattaggtttgaaaatggctaccctctaccaggtgtcagattctgggaaacttaagtaatcacaggcagtctcctgctaccgaatatgcagttttataaaaataattacaatttataaaacttacagtctttatttttaaaagaattgtctctatttgtgtaaaaccaagaatgcgtctttagttgtactgaagaacttacttctgtagatacatgaacatcatctcataagattttaggtatatcaaaagtgctgagttttgtgtgttaaaatttgattttttgagtggtgtagaacaagtgtacaatacaaagtaaaattacctgttcaatggctacttcaacattttgatagcagtacataaagtgtaaagcaaccagtgagacaacattttagccaggattttaaggaactgaatagatttgcttcttagctaactccatgtataaacagagagagagagagagagagagagagagagagggagagagagagagagagagagagagagagagagagagagagagagagagagagagagagagagtttgctggtacttattcagctctcagttatatttcagaatagcatacttagctagtccgaggagcctgaggctcagaacaaagtcacacaggagcagaggtctgtggcaatagaggggttactcttccatcggagcttctccagttccacagtccacttcttatggtcacatattcataaggattccaagagtcttctttcagaaatgattcaagcttttttcttttataatttcttttataatctgttctttaaatatgcccatgcatgtgtctatgtgtaggtttatgtgagtatgtgtatcattgtgagagaacatacatgttcctataggtgctcaagaagactaaaacagggaatcataccacctggagatggttatgaattgcctgatttgtgtggtaggtaccaaagcagtacctgttaacccatgtctccagcctcctaagttctatatgttaaatggtattagctgttctcattgtgcttacatttgtacccatagaggcaaagaaagatggctaaaaaaatgtaattctttaatgttaaatgggtcagtatcatcagcatgtgtcaattacatatttgcatttgcatttggcagaatactctatttttctaaatggccttgcacttggtgattcgatggaataaataattgaagtaaagacttgcctttaagcacatcttatcacagtctgtatggctgtgtgcgaagtttaaatttgaaactcagtggtcacaatatctaagactaaatgctgctcagttgtgttgtaagtcacaattttcatgcatttaaaaaattgagaagacaaagaaacttcagtggttcatctataggaaatatggtcatatattccaaagaaataatgcctgtgaaggagaaaatattttaaatgttgccattttactatcaacattgcagaatttcaaacatcactggcacctgaacacagaacatgtttgctaataggaaatagccccaatgtgtgttagtttctgtctttgccaggaagtgtcctgcaagttttgctgggaagttttctgaatgtatgccaagcactagctatcacccagacttaaataagcattcacttaatcactttgatgcccttccttcaaatcctatcataaagcagtcacctttgtcctgacaaaccatctcagatctctacaagagaggtaagtgggagctgaatgatggtgagagccttgtgtctcttactatagagcgaagatacagaagaatctctgtcttcacattaattagggctcttagaaatagcaaagtcttccccagtcattttctgggcaaggaaaaacattggattcttcatttcattccagaccaatccaaagctgtgatggagctgagactactgtagccctttagatctaggcaaaagtgaagggagggatggccatctttgcttgttctgtctactacactctctctggtgccctgtttgttgttctctcaaagacaagatgctgcctcacctggtcctcaacagtatttcctggatgctgctctcctgcctgttgtttgtatttcaggtacaaggtaagtcttctctgacctagtctgtaattgtccatgagcgataagtgatgagaagcaaagaagtgttcttagaattcctgtgtggtaattgtgagggatatccacacaggaaagtcacctacacttcatccatcctcttgccttcttctatgttgctggtgggaaaaaagtatcatggtattccatcattccctgagtgagagggtttctatttgccaggaggctctcaattatgatagtaagcatgtaggagaggagaagaaatatgtgagtcactaatgaagcatgcaagtagaccttggggagaatggagtatcacagacagtgaaatgtgtagaaagagtaaaatgaaaggaagctctttcacactatatatatatatttaaatgtggcacctagctaagtatagtacctagctaaatacataacttgaaaaccagcattcagggaggagtttcaggaggatacctctgagttcaaggccaacttcatctgcacagtaaattccaggacattcaggcctgcagagaaactttgtcacaaaggaagcagaagcaaacattcaagcaacaggatcacaagatggaaagcttagtgaggctgtcaccaccttaattgtagccacccactctacaaaaaatgtcctttataaacattcccttgagtgttcctccccattcaattcccattctcggtgtcatgacatccctctcattatctctctccaccccaggtgaagacttccagaaggaagtgccctctccacgtaccagctgccccatgggttacaaggcttatcgctcccactgctatgccttagttatgacacctaaatcctggtttcaagcagatgtgagtggtaaagggtggggttgaagataccagcacaaagtgcaagtaggtaacaggagagtagggctcatgtttccatggttccatggggggggagcgagtgggtcacaatattggttcttcctttttttttctgtaatctttttgctcatggacatctggagtatcagtctttctcgccttctgtccctcatgtagctggtctgccagaagagaccctcaggacatctcgtgtctattcttagtggaggtgaggcttcctttgtgtcctccttggtgaacggcagagtggacaactaccaagacatctggattgggctccatgatccaacaatggtgagattctatttttctctgtttgttctctaggagctaatgtctcccaaacacaattttctgtgtgttctctctgtgtataatgtaaggtggatctagcactcaagctgggtgacattagagtaaggaatatcctcaacactggggtgaaaggctgaattatatagaggttcctcatattcagcttaatttgtttgcctattgtcagcttttacatttttcttttatttaagaaagtccacgagtgacttctttcttttgtcttcaaggaaccttcacaaaaagtactgagagcattgtaaattaagatttacatttattcattgaaaaaatagatatattcattttatttgtatgttttctctaaatgtatgtgtgtgcatgatgtgcttgcctgatacttgaagcagtcagaaatgagcttcagatcccttaggactagagccatagattgttatgatcctctatgtgggtgctggaagccaatccttaggagcaggccatattcttacctgctgagctatctctctgccgtctacttttgttgtttattgagacgatactgtgagatcaagaggctattctgcaatgtatcattcattactcattgtgtagcaaggac

SEQ ID NO: 146 - DNA, 759 bp, Mus musculus
acaccatccagatctctggaagacagacaagatgctgcctccaacagcctgctccgtcatgtcctggatgctgctctcctgcctgatgctcttatctcaggttcaaggtgaagactccctgaagaatataccctccgcacgcattagttgccccaagggctcccaggcttatggctcctactgctatgccttgtttcagataccacagacctggtttgatgcagaactggcctgccaaaagaggcctggaggacacctcgtatctgtgctcaatagcgctgaggcttcattcttgtcctccatggtgaagagaacaggaaacagctaccaatacacttggattgggctccatgaccccactctgggtgcagaacccaatggaggtggatgggaatggagtaacaatgacgtgatgaattactttaactgggagaggaacccatctactgccttagaccgtgctttctgtggcagcttgtcaagagcttctggatttctaaaatggagagatatgacatgtgaggtgaagttgccctatgtctgcaaatttactggttaaacttatcagacagcaaacatcccgaatttgtcttgaagagcatcatggacaagggacaaaatgtgaagactcacctagaaaaagcattttctatctacagtccacattagagccttaatctgctctttccatatctgtctttagtccttttggtataagtttgggctcaattctaaaataaaaataagctttctgtcaca

SEQ ID NO: 147 - DNA, 528 bp, Mus musculus
atgctgcctccaacagcctgctccgtcatgtcctggatgctgctctcctgcctgatgctcttatctcaggttcaaggtgaagactccctgaagaatataccctccgcacgcattagttgccccaagggctcccaggcttatggctcctactgctatgccttgtttcagataccacagacctggtttgatgcagaactggcctgccaaaagaggcctggaggacacctcgtatctgtgctcaatagcgctgaggcttcattcttgtcctccatggtgaagagaacaggaaacagctaccaatacacttggattgggctccatgaccccactctgggtgcagaacccaatggaggtggatgggaatggagtaacaatgacgtgatgaattactttaactgggagaggaacccatctactgccttagaccgtgctttctgtggcagcttgtcaagagcttctggatttctaaaatggagagatatgacatgtgaggtgaagttgccctatgtctgcaaatttactggttaa

SEQ ID NO: 148 - DNA, 22436 bp, Homo sapiens
ttccttctgacccatatctcctgggtcctgaccatgactttcttgaaagtgtagccccaaaattcttacctctgaatgtacttcctctgatccccgcctcctaggtactaatggttcagactttaatttcctcgcaagttgtgtctccaaagggatctagggaagctctatgctgcatccttaggcatctaggctataaatgcagggagtcttgtgtccctcgtgtccctcccaatttaggcataccgctctcgacacgggcagttatgtgggacctgttccccaccactcttgccaggaccccaagtttgtaaatggctaaaagagacagagagagagagagagagagagagaggcagagaggtgaaagaggcagagaggagaaagaggcagagaggagaaagaggaagagagacaaagagggactcaaagagagaaagaaagagagatagaaatagtaaaaaaaaaaaaaaaaaaaaaaaaaaaaaaaaaaaagtgggccctattcctttaaaagccagggtaaatttaaaacctataattgataattgaaggtcttcttcatgaccctataacactccaatactacccttgttgtcagtgtaaacaaaggcatagcctgaaaacactgagaccactgacaaccatagccttcctatcaaaaatccttaacccggtaacccgtggatgacccaaatgcattcaatctgtagcggcaactgctttgctaacagaagaaagtagaaaagtaacttagaggaaacctcactgtgagcacacctcaccagttcagaattattctaagtcaaaaaagcaaaaaggtagcttactaactcaaaaatcgtaaagtatggggctattctgttagaaaaaggtaatttaacactaaccactggtaagtcccttaacccaacagatttccttacaggagatttaaatcttaattactatacaaaggtccgaccagaccgaggaggaactcccttcaggacaggacgatagatgtttcctcccaggtgactgaggaaaaaaccacaatgggtattcagtaattgatagggagactcttgtggaagcagagttagaaaaactgcctaataattggtctgctcaaacgtgcgagctgtttgcactcagctaagccttaaactacttacagaatcacaaaagactatctcaatcctgactcaaaaagttcgctacaccctttctgaaatgaatttgcataagaactgttgtttatgggaatgcatcttgatggggcagctgggttgttatgaaatactcaggaacccagcccagctctaggactcacccctgagcacaaaggcaatgttaggcatgctggtaaaggaccactagaatccagcagcccgaacccctttctttgtggtcaagaaaggcggtaaaaggggtgtaggaccactacatcggtgagcgtaactagtctgataagcagaggtccatgggtggttacgtgccctggaaaggaataagcattaggaccacagaggacgctctaggactaatgttcttcagaaaatgactaggggtgctggcatccctatgttcttttttcaggtagcaaacattcccctcaaggcaaaaacaccccgaagatgtattctggagaatcgggaccaatttgaccctcagacgctgagaaagaaatgacttatattcttctgcagtattgcctggccacaatatcctcttcatgggggagaaacgtggcctcctgagggaagtataaattatgacaccatcttacagctagacctcttttgtagaaaagaaggcaaatggagtgaagcgccatatgtacaaattttcttttcattaagagacaactcgctattatgtaaaaagtgtgatttatcccctacaagaagccctcagagtgtaccttcctaccccagcatcccccctactccttccccaactaataaggaccccccttcaacccaaatagtccaaaaggagatagacaaaagggtaaacaatgaatcaaagagtgccaatattctccgattatgcccactccaaacagtgggaggaggagaattcggcccagccagagtgcatgtaccattttctctctcagtcttaaagcaaattgaaatagacctaggtaaattctcagctaaccctgatggctatattgatgttttacaagggttaggacaatcctttgatctgacatggagagatataatgttactgttaaatcagacactaaccccaaatgagagaagtgccgccataactgcagcccgagagtttggcgatctctggtatctcagtcaggtccatcataggatgaaaacagaggaaagagaacgattccccacaggccagcaggcagttcccagtgtagaccctcatagggacacagaatcagaacatggagaatggtgcagcagacatttgctaacttgcgtgctagaaggactaaggaaaactaggaagaagcctatgaattattcaatgatgtccagtataacaaagggaaaggaagaaaatcctactgcctttctggaaagactaagggaggcattgaggaggaaaacctgtctgtcacctgactcttttgaaggccaactaatcttaaaggaaaagtttatcactcagtcagctgcagacattagaaaaaaacttcaaaagtcagccttaggcctggagcaaaacttagaaaccctactgaacttggcaacctcggtttttttataatagagatcaggaggagcaggcggaatgggacaaacgggataaaaaaaaggccaccgctttagttatagccctcaggcaagtggactttggaggctctggaaaagggaaatgctgagcaaattgggtgcctaatagggcttgcttccagtgcagtctacaaggacattttaaaaaagattatccaagtacaaataagccaccccctcgtccatgcccgttatatcaagggaatcactggaaggcccagggccccgggggatgaaggtcctctgagtcagaagccactaaccagatgatccaacagcaggactgagggttcccggggcaagcaccagcccatgccatcaccctcatagagccctgggtatgcttgacctttgagggccaggaggttaactgtctcctggacactggcacggccttctcagtcttactgttctgtcctggacaactgtcctccagatctgtcactatccgaggggtcctaggacagccagtcactagatacttctcccaggcactaagttatgactggggaactttactcatttcacatgcttttctaattatgcctgaaagccccactcccttgttagtgagagaaattctagcaaaagcaggggccattacacacctgaacataggagaaggaacacccgtttgttgtcccctgcttgaggaaggaattaatcctgaagtctgggcaacagaaggacagtatggatgagcaaagaatgccatcctgttcaagttaaactaaaggattctgcctcctttccctaccaaaggcagtaccccttagacccaaggcccaacaaggactccaaaagattgttaaggaccgaaaagcccaaggcctagtaaaaccatgcaatagcccttgcaatattccaattttaggagtacagaaacccagtggacagtggaggttagtgcaagatctcaggattatcgattaggctgttgttcctctatatccagctgtacctaacccttataccctgctttcccaaataccagaggaagcagagtggtttacagtcctggaccttaaggatgtctttttctgcatccctgtacattctgactctcaatttttatttgcctttgaagatccttcgaacccaatgtctcaactcacctggactgttttaccccaggggttcagagatagcccccatctatttggccaggcattagcccaagacttgagccaattctcatacctggacactcttgtcctttggtacatggatgatttacttttagccacccattcagaagccttgtgccatcaagccacccaagcactcttaaatttcctcgctacctgtggctacaagattccaaaccaaaggctcagctctgctcacagaagtttaaatacttagggctaaaattatccaaaggtaccagggccctcagtggggaacatatgcagcctatactggcttgtcctcatcccaaaaccctaagcaactaagagggttccttggcataacaggtttctgccaaatatggattcccaggtatggcaaaatagccagatcattatatacactaattaaggaaactcagaaagccaatacccatttagtaaggtggacacctgaagcacaagcagctttccaggctctaaagaaggctctaacccaagttccagtgttacgcttgccaaaggggcaagatttttctttaaatgtcacagaaaaaaacagaaatagctctaggagtccttacacaggtccgagggatgaacttgccaactgtggcatacctgagtaaggaaattgatgcagtggcaaagggttggcctcattgtttatgggtagtggcagcggtagcagtcttagtatctgaagcagttaaaataatacatggaagagatcttactgtgtggacatctcatgatgtgaacggcatactcactgctaaaggagacttgtggctgtcagacgatcgtttacttaaacatcaggctctattacttgaagggcctgtgctgcaactgcgcgcctttgcaactcttaacccagccacatttcttccagacaatgaagaaaagatagaacataactgtcaacaagtaattgctcaaacctaccccgctcgaggggaccttttagaggttcccttgactgattccgaccttaacttgtatactgatggaagttcctttgtagaaaaaggaccttgaaaagtggtcagggataatggaatacttgaaaataatcccctcactccaggaactagtgctcagccggcataactaatagccctcactcgagcactagaattaggagaaggaaaaagggtaaatatacatatagactctaagtatgcttacctagtcctccatgcccatgcagcaatatggagagaaagggaattcctaacttctgagggaaaacctatcaaccatcaggaagccattaggagattattattggctgtacagaaacccaaagaggtggcagtcttacactgctagggtcatcagagaagaaaggaaagggaaatagaagggaaccaccaagcagatattgaagccaaaagagctgcaagacaggaccctccatcagaaatgcttatagagggacccctagtgtggggtaaccccctccaggaaaccaagccccagtactcagcaggatgaatagaatggggaacctcatgaggacatactttcctcccctgaggatggctagccaccaaagaaggaaaaatacttttgcctgcagctaaccaatggaaattacttaaaacccttcaccaaaactttcacttagacattgatagcacccatcagatggccaaattattatttactggaccaggccttttcaaaactatcaagcagatagtcagggcctgtgaagtgtgccaaagaaataacccctgcactgcaggccatacctttcaatccctgtacctttaacctccttgttaagtttgtctcttccagaatcgaagctgtaaaactacaaatggttcttcaaatggagccccagatgcagtccatgactaagatctactgcagacccctggactggcctgctagcctcatgctccaatgttaatgacattgaaggcaactctcccgaggaaatctcaactgcacaacccctactacaccccagttcagcaggaagcagttagagcaatcattggccaacctccccaacagcacttgggttttcctgttgagaggggggactgagagcaggactagctggatttcctaggctgactaagaatccctaagcctagctgggaaggtgactgcacccacctttaaacacggggcttgcaacttagttcacacctgaccaatcaagtagtaaagagagctcactaaaatgctaattaggcaaaaacaggaggtaaagaaatagccaatcatctatcacctgagagcacagcgtgggggacaatgatcaggatataaacccaggcatttgagccagcaatggctaccctctttgggtcccctccctttgtatgggagctctgtttacactctattaaaccttgcaactgcaaaatatatatatatatatgaaaaataattataaaattggtaatggagaagcatggaaataagtgggactgaggaataacataaatggactactatttatttatcattttattaatattattttttaaaataatattaattattattatttataattttattatatttatcattttattaatgatattatttattatatcatttattatttatcattttattaatcattaatattaatgtattatttatcattttattaatattaatttgattgtattacttctttttgcttcatttctctaaaaaataaagctaaaaaagatggcaagatattatcgctgtagattctagatggtcaacctatacttgtttgttaaatgttttctgtatgataaagataatttattacaaaaagaaaagcaacatgactatggaattatttcttatttttatttttatttgctaccacaagaaatgtgaactctgatacattgtgaacagttcagatctgcaaaattatcacccacaagctgtttgagtatgatttatggtaattaattgaaaacattatcttaattttttcccaaatgaacattttgtattataactagcttattctaaaagaaaaatcaataaaaagcaatagcctttttaaaatacccaaatagataacgttagaagagcaaacatgatatgaacagggaactcttccaagatcaatgtgaaaatttgaaaccaaataaatattaacacagttttctgataaaaattattgcctccaataactgcacaggtcatatgatagttactgttcatggcttacgtataattgaccaaatttcagtagctatgttatcagctttccagttctttgatgttaataacttccctcattggcctcaggggctttgaagttttgtccctttttcctgttttatagttgctcagcacctaatcttatccctttcccaattcttctgacagtgttaggataagatgaaaggaccaaagtggcattctggacatctggttaatatatctcaaaggggtgcactttagtgataaatctccagtgagatacagttcaaggctatttttgacatggaccctgctgagccatcttccaggaaacctctacattttaccatccttgaaacaaatatattaggctcctgcaaagagatcagttttcacttttataattctaagaatgactactaagtcttatctgcaaatatctgattcagaagataatagggataaaagtacaaattggacatcttttggcaaaggaagctccttaaaactcagccttggttacatcaagaataagaattcctgtgtcatccctaagaagtagatttttatataactcaaaaccagctcaagaaatataatatttaaacaaacttctcagtgcttggttaataagcattgttatgaagaaacaatgaaaaataaaacaaaaacaactcaactttagtgagtttagtgagtgtcattgcaaagaaaatttcacattgcacttagggattttataaccttaaggcttattacaaaggtcacactatttcaattaagaacaaaagtgagttttaataataaactgtcagcatttcaaatcttctctcctaggtatcttgaaatatacaacatattgttgttaactatagtcaccctatgtgctatcaaaagctagaacatattcctcctatctagctgtatgtttgtacgatgaactaaactcttttcatctcccctcacccgtctcagcctctggtaactattctaccctctggttaccttctaccccgtacctccatgtgtttacatattgttgtataaattttgtggaaaaaaatcctttttaacaaaataatctgctggctatatttcttctcatattatttgaggaattgcattgaattttgggtactgaattttgaggacgtgaattaaggatgagctacatctcatgacctcgtcacagacccctactataaacatctgcatacaagttggcatattacaacaatagcatgagagtcagggtctgtagaaattcccagcctaactttttcctggactggccaaactgaacctgaaccagtgtatgggcaatgtagtatgcttgtcagaggcaccaaactgctaactcaaaaataaacatgactaaaagaacttctcccagtatacccatatgaagctgaccatttgcccagtaagaatgcaatgaaaagggcttttaatgtacagccaaatggcagtccagcaaggaagctcatgagcaacctacaagtagtgagcattttgatgtaatagagacttacatgcaattcagaattatgtttacaacatcacaaaacaaaaatttagagataggctctcactctgttgcctaagctggagtgcagtgggatgatcataacttactgcagccttgaactcctgggttcaactgaaggtcctcctacctcagcctgctgagtagctaggaccacaagcacacaccaccgcaactggcttaaattaaaatataaattgtagagatagggtcttaatgtgttgcccaggctgctcttgaactccttgcttcaggtgatcctcccacctcagcctctcaaagtgctgggattatagacctgagccacagcacctggccaactgacctatgattttacacaatggctgctcttcccttctttaactattattcattcttctttgatcctcattatttgactgtagtccttcttatgtcttgttttccttcattacctcttattctatcacattgccattgtcattctccactggggaagctctttcttgctgaagactggaaagacaagtccattcacctgattttctgtaagattgtggctcatgtattgacttgtcagacaattctgaagtttcatcaaaattagctatcatgcttgcataatggccctgaaccctcactcctactcttagcttcagtaccatctatgtcctcaactgtccatgatacttataattcccgtaaatcttcacttaacacctaacatttatttaatcttactaggcaaggtaataagaaatacataggtttgcctccagaagtgggttcttaagaaacccaccagaggaactcctctttcagatgtccacattagaagatttcatatcacatttggtgccacaggcctttgacaaggaggatgcagaggaaaaagcaaacttcacctcttcctagggaaagtgttggcctgccaacaggaaagaggcaacatctgggaaaatccccagtctttgccaggaagagtccatgccaaccccaccccatgacccctgtcctgcctactcattgtcactcttcactccaatgtccctcccccagatcctcttataaaatcccactctttcctgaccagacaaaccataccatatcccaccagagaggtaagtgggagctgagagaagatgagacccagggaggagctactgcacatgacacaggagaatacatgggagggtcccttcctcagggagcacaggaactctgagactcagcaagggtgtcctgggagggctcggggatgggagagtacacagattcacaactcattcagaactgtagaagatgatggatgtgaccaagatcactttagtcctaggggactagagaaggaaaatgacatgaggcagtggggtatctgtgtgttctcccactgaccacgctttctttagtgactcctgattgcctcctcaagtcgcagacactatgctgcctcccatggccctgcccagtgtatcttggatgctgctttcctgcctcatgctgctgtctcaggttcaaggtgagattgctttgcctctagcactgggttccctatgaatcctcagagctaacaagaggaggaaggctcctgtgtgtcatgtgaggtaatgacgtggtgtctaatgaacctgcctgcagttcttgcatcatctctccttccttcaggttaacttgcagtgggaggctccatggtggtccactaacagtggaatgagatggcttccatttagtcagtggactctaatatacactggtgggaaagtggactctaatatacactggagggtcagtaatgagatgtggggagggacaatgattggaggacccaatgtagagacagcccagagtgaggagagtattgaatggttgaataaggggaaagggtaataagagactggatggtgctccatttactacggctattttgagataaagaatttctgaaaacataagggaagatgaaggggtgtcaggaatgtggtcttcctccccaaggacattcctaggtattccccaaggtcatctcccaccccaagccccactcttcattttaccctcccccctcttcttccacctcaggtgaagaaccccagagggaactgccctctgcacggatccgctgtcccaaaggctccaaggcctatggctcccactgctatgccttgtttttgtcaccaaaatcctggacagatgcagatgtgagtggttagatgtggtgttggaggtgaccggtctcagggggaggagggtctccattcaggagagttccttgggaatgaggatgaacacgtttatctttcacacagtcctcctcccacctacctttgccctgccctccctcagcaggtctcaggctccctctcattctctttgttgccctcaaagctggcctgccagaagcggccctctggaaacctggtgtctgtgctcagtggggctgagggatccttcgtgtcctccctggtgaagagcattggtaacagctactcatacgtctggattgggctccatgaccccacacaggtgccagtatatcctcccctctctgttacctctcaaggtgctattgttgcccaggcccactccctgtcccctgtgcctgcccaggaagtacttcagggagcactggagctcagattctggggaatatttggggggaaagggaaggccatgaagcatctgaagatctgagttctgtggaggtctctatctttcagataaaatcaatctgccttcctcaggcgtattacataattctcatatgaggctgggttaacaattctctgagcttcatggagtctttgcctactattctgaaggaactcttaatgaagataggatcaatttttgtccccatacagaactgacattacttttgaggttcacaagctaatcacaaatgctacatcaattattgttctgcaaataatatattaccttgagttgttccaaaggtcttatgtttattggctggaattttccaatagcaatgaggagtcaaggaagagtttcctactcaccggcagcatctggaatagcagaccaactttcctcatgctggggagcaaatcaggtgttgcagctaaggggccatgcaagaagagctgcaatggccattcccttcacctggctacctcctctactctacagggcaccgagcccaatggagaaggttgggagtggagtagcagtgatgtgatgaattactttgcatgggagagaaatccctccaccatctcaagccccggccactgtgcgagcctgtcgagaagcacaggtaagaaacagaggagctgcctcttcccagtgttttccatctcatcccccattcctgggtctgaccttcaggaaatcttcctgagctagaaaatacaatgttagtgtgtcttctcttatctcctctcttctccactttctttgaatctctctcctggattgggacactggtgaaggtgagggagaggctttaacttctaggctaaaacctgggatgccccttcattggattcacaagcttcctcagccccattccatttatgtcttctgtctctccagcatttctgaggtggaaagattataactgtaatgtgaggttaccctatgtctgcaagttcactgactagtgcaggagggaagtcagcagcctgtgtttggtgtgcaactcatcatgggcatgagaccagtgtgaggactcaccctggaagagaatattcgcttaattcccccaacctgaccacctcattcttatctttcttctgtttcttcctccccgctgtcatttcagtctcttcattttgtcatacggcctaaggctttaaagagcaataaaatttttagtctgcacttgtttgtcttgtatatgccagtgtcatagccatactctgagaaggacaaagtgtttgagtggaggaaactttatgggtcttgcttcttccctattcacccaggcctctagggaaaatgatgaagtgtgcatccctaccagtgtgttatgatgagggtgtgggtcctgctcatgtaggatttgtgttgtggagagatgaggacatttctctcccgcgtacttactgccctcccattcccgtagcccaaacctgacagtgtgacatgaacagatttaggaggctctgatggtgcttagaatagtacttctcagagaatggcatcagcaggatggtagataggactttccagctcttgaaccttcacagaaacattcatttgaactactacccattaaaatggaaataccttcacaagagctaacaatcccaagtgagtgattaaagcatctgaatgttgcaaaaaataagaaaggatgcatcgaagagggtagaaagaagacttttacattatttatatcacccctccatcaatctcagtaagcacagcatggagagacattccctaaacttggggaaagagagtgaaataagcacttgagttttccatggaccctaacactaggtttgcctcagtaagacccagtggcctctgactccaggcagacacccttggacttagactccaggctgccttgatgccaggccaggctctgtggccccaggctctgtgaccccaggctccaggtcagcccccatgactgcagcctccagtcttgccccagaagatgcaggctctagacacacacagcatcatgcttttccccatagctccagaccacaggccagcacccactgacaaagactctaagcccacctcaaggacaagctagcacttgcagccacagactccagggtgacccctgaaatcctagacatcaggcctgcccatgtggacctgcccttcagacccaccacagctccaggatagctcccacagctacaacttcaggccagcacttgcagaccccagctccagactgacactcacagtcgcaggatacggtcctgtcaaatcccaaaccctccccaagcctttaggtccatctgagcacaaagccctgatgctaggccagcctctgtggcctctgtcactaggccagcccccacagacacaagttctggattttcccagttccaggcgaggctctgtggactcggtactagtctggcctcatactccagcagacccaggatcaagcttcattacagtagaccttagcaccaggccagcccccccgactcaggctccagccttagccccatgaatccagtctccagacttaccccagaggcaagttgacattcatggtcccaggctacaggccacccccactaaccctggctccataccagcccctgtagtttcaggtaccagcccagtatgcacagactcaaactccagacctgtcctagagactcagatactacatctgtcctagtgcctggctaacccctgaagacatgggttcaaggcctgctttagagccagattggtctccaggaagtaggatttagtctggctcctgtgattagaggcttcgggcctgccctcatgaagtgactgcctaccctggtataccaagtcaataggtccacttgaggatgccagcagcaagcctgcccaaagaccaagccagatggcctgcccagaatctctggatgactgactggtgaagggctttgtctgctaaagccagtctgtaaaaactggaataagtgactacttgttcaaaaagtcaaacaccaaagacacatgaccacaagtatcataaacaatcaaggaaatatgatattaccaacagaacaaaataaaggactagtaactgaccttaaggggaaagaattttacaaactgctcaacaaataatttaaagcaattgtctaaaagaaactcagtgagctacaagagaatacagatagacaactaaatgaaatcagaaaaacaatatgtgaacaaaatcagaaggtcaagaaagagatttgttttaaagttaaaaaaaaacacatagtggctgaactgaagaaatgcatggagaatttcaacagcagacttgatcaagcagcagaaaaagtcagtgagtttgagacaagtcatttgaaattatccagtcagagaaacaaaaagaaaaaagaaacaaaaagagaaaataaagcttaaggaaactatggtacatgatcaactgagccaatatatatattatgggttttctagaaggagcagaggcagaaaatgggcagaaaacatatataaaaaataatgggtcatggggtttggcatccccatgcctgtcagtgcctcaccccagccaacgagcatgcacccagccatgctgccactgccgtggcatgagcacagatcccactgctatcaccctgacagagtactgtggtcactgccacttactggagtgttgtggccagcaatccaggaacacctttggacccccagcacagcaggttcctaacttcgaggggtgagagaacaaagctaggggcctgataatagcattccagaattggggaatgctgagctgaaccttggcccactgacatcttccagaaatgaagtgagtcaactgagcccaccttataccacaatcaaacccccaagggcatcaaaaaggataaacacacacacacacacacacacacacacacacacacaatccatccaaaaaacagcaacttcaaagattaaaggaacgccagcccacacagatgagaaagaaccagtgcaagaactctggcaactccaaaagccagcgtctatttttacctccaaacaattacactagttatccagcaatggttcctaaccagtctgaaatatctgaaatgacagaaatagatcttggaatatggataggaaccaagattattgagcttcaggcaaaagtgaaaatccatttccaggattctatacaataaaacgatacagaaaatgaaagatgaaatggtcattttaagaaagaaccaaactgatctgatagaggtgaaaaactcatttcaaaaatttcagaatacaatcacaagtattaacagcagaattgatcaagctgaggaaagaatctcagatctcaaagacagttctctgaaataacttagacacatattagaaattaaaaaaagattgaagaaaattaaacaaaacctctgaaaattatggtattatgtaaagagaccaaatttatgactcattgaaagcaagcaatttggaaaacatatttcaaaatatcatccatgaaaacttccccaacctccttggagagggcaaactttaaattcaggaaatgcagagaacccctgtgagactacacaagataaccatccccaagccacacagtcatcagactctccaaggctgaaatgaaagaaaaaaatgttaaaggtagctagagagaaggggtagatcacttacaaagggaacctcatcaggctaacagcagtgttgtcagcagaaatcctacaagccagaagagattggggccctatattcagcattcttaaggcaaagaaatcctaaacaagaatttcatatccaggaaaactaagcttcataagctaaggagaaataagatccttttcagataatcaaatgctaaaggaatttattacctccagacctgccttacaaaataacctaaaaagagtgctaaatacagaaaggagtgaccattactggctactacaaaaacatacttaagtacatagaccagtgacactataaagcaaccacacaaacaagtcttcataataactagctaacaacatgatgacaggatcaaatctgcatacatcaatactaaccttgaatgtaaatgggctaaatgccccaattaaaaggtacagagtggcaagttggaaaacaagcatgacataatggtatgcccctctcatatgcaatgacccatctcacatgcaatgacactactagactcaaagtaaagggatggagaaaaatctaccatgcaaacaaaaaacagaaaaaaaaagccaggtttgctataccaatttcagacaaaacagactgtaaaccaagagatttttgaaagacaagggcattatgcagtggtaaagggctccattcaaatgaagacctaactatcctaaatatatacatacccaatacaggagcacccagatttataaagcaagttcttagagacctacaaagagaattagataaccacacaatcagagtagagacttcaatactccactggcagtattagacagatcatcgaagcagaaaactaacgatgatattcaggacctgaactcaacacttgaccatatctagtagacatctacagaactcctcactctcaaacaatagaatacacatttttctcattggcacatagcacattctctaaaattgaccacacaattgagcataaaacaatcctcagcaagctcaaaaaaacaacaacataaaaacaaaaacagaaatcataccaaccacactctttgatcgaccacagtgcaataacaatagaaatccctactaaaaaatcacctgaaaccatacaattacatggaaattaaacagcctgctcctgaatgactttgaggtaaataatgaaattaaggtaggcataaagaaattctttgaaatgaatgagaacaaagatgcaacatatcagaacctcccacacacagctaaagcagtgttaagagggaagtttatagcactaaacacccacatcaagaagttagacagatctcaagttaacaatctaacatcacacttagaggaattagacaagtgagaacaaaccaactccaaagctagcagatacaagaaataaccaaaatccgacctgagctgaaggaaactgagatgtgaaaatcatacagaagatcaacaaatccatgaatatgtcatttaaaagaataaatatgactgatacaacactggctagactgacacagaaaaaagataagatccaaataaacacaatcagaaatgacaaaggggacattaccactgacaccacaggaaaaacaagcaaacaagcaaacaaacaaacaaaaaccctcgacgactactttgaacaccactgtgcatacaagttgaaagacctagaagaaacggtttaattcttggaagcatataacctcccaagattgaaccaggaagaaattgaatccctgaacagaccaataatgagttctgaaattaaatcattaataaaatacctaccaaccagagaaagcccagggcaggatagattttctgccaaattctgtgagatgtataaagaagagcagaagacaccattcttactaaaactattccaaaaaattgaggaggggagactccttcctaactcattctatgaggccaacattgtcctgatatgaaaatctgacaaagacacaacaacaacaaaaaatccaacttcaggccaatatccttgatgaacattgatgcaaaaatccttaacaaaatactagccaactaaatccagcaacacaccaaaaagccacaatcaactaggctttagaatgtgaggttggttcaacatatctaaatcaataaattgatttatcacataaacagaaccaaaaacaaaaaacacatcatcatatctatatatgcaggaaaggctttagacaaaattaaacatctctttgtgtttaaaccctaaacaaagtaggcattgaaggaatatcctttagaaccttaagcgccatctatgacaaacccatagaaaacatcgtactgaatggacaaaaactggatgcattccccttgaaaactgaaataagacaagaaagtcctctctccccatttctattctacatattactgaaagtcctggccaaaacaatcaggcaatagaaggaaataaatggcatccagatagggtgagagaaagtcaaactatccctgtttgcatatgatactattctatatctagaaaaccccattatctcagcccaaaagctccttcagctgatgaacaacttcagcaaagtttcaggatacaaaatcaatgaaagaaaatcactaggattcctatataacaacaatatcccagcagagagacaaatcaagaacacaatcccattcacaatagttataagaagaataaaatgcctaagaatacagataagcagggcgacaaaagaactctacaaggagaattatcaaacactgctcaaaaaaatcagagatgacacaaacaaatgaaaaaacattccaggctcattgataggaaaaatcaatattgttaaaatggccatactgcccaaggcaatttatagatttaatgttattcataagaaactaccggaaactttcttcacagaattagaaaaactattttaaactttatatggaacaaaaaagcccgaatagtcaaggcattcctaagcaaaaaggacaaagctgaaggcatcacattgcccaacttcaaattatactagaaggctacagtaacccaaactgcatggtactagtacaaaaagagacagatagaccaaaggaacagaatagaaatcccagaaataatgctacatacctacaaacatctgatcttcaacaaagttgacaaaaataagcagtgggaaaaggacttcctattcaataaatggtgctgggataactggatagtcatatgtagatgattgaaactggaccccttctttatactattttaaaaggtaaactcaagatggattaaagagtcaaatgtaaaactataaaatcctggaagataacctaggaaatgcccttctggacataggatcttgcaaagatttcatgatgaagatgccaaaagcaattgcaacaaaaacaaaaattgacaaatgggatctaattaaagaaaagagcttctaaacaacaaaagaaattatcaaaagagtaaacagacaacctacagaatgggagaaaacatttgcaaactatgcatctgacatagtttggtctaatatccagaatctacaaaaatcttaaattagcaagcaaaaactgaacaactgcattaaaacgtgtgcaaaggacatgaacagacacttttcgaaagaagatatacacacagccaagaagcatataaatatgctcaaaatcactaatcatcagataaatgaaaattaataccacagtgagatgccatctcacaccagtcagcatggctgtttttaaaaagtcaaaaaataacagatgctagcaaggttgcagagaataggctatgtttatacacttctggtaggaatgtaaattagttcagccactgtggaaagcagtttggaaatttatcagataagttaaaacagaactactatttgacccagcaatgctattatggggcatataccaaaaggaatataaatcattctaacataaagatatatgcatatatatgttcattacactgttattcacatagcaaagacatggaatcaacctaaatgcccatcaacagtaggctaaataaagcgaatgtggtacatatacacagtggaatactacatagccataaaaaacaataaaatcatgtttgcagcaacatggatggagctggaggccatgatcctccaccaactaacacaggaacagaaaaccaaatactgtatgttatcacttataagtgagagctaaagtttgactacagatggccaccaagaagaagaaaacacacactggaacctacttgaggatgaggggtgaaatgagagcaaggactggaaaagcacctattggatattaagcttattacctggatgaaaaaataatctatacaccaaaccactgtgacatacaatttacctatataacagactggcacatgtactcttgaacctgaaataaaagattttaaaaaaagaaagaaaaaaatggttgtgaaaaacttcccataactggtgagaaaaaggaacatctacatccatgaagtacaaaaaactccacatacattaaatataaagacatcttcactgagacacattacaatcaaattccaaaaagtcagggatgaaaagaaaattttcaatgcagcgaaagaaaaataacatattatgtgcaagcgaatgtctataagattatcagttgatttttcagaaggtacctttcagggcaggagagagtgggataatatattcaacatactcaatgaaaaaacaaaacaaaacaaaaccctgcaaaccaagaacactatacctggcaatcctatccttcagaaacgatgaaaagagaggaagtttaccagaaaaacaaaagctgagagagttcattaacactagaccttctttatgtaaaagactaaaagaatttcttcaagatggaagataaaaatgctagctgataccataaaaacacaggaaagtataaagtataaattgactatgttaagtacatagtaaaatttgaaatactctaacattgtagtgatggttggtaaatcacttaaatctttagcataaaagacaaaactattaaaaacaacagtaactacaataattgttaaggaatatgcaataaagaaacatgtaaattgtgacaccaataacaagaatgtgcaaacaacagcaaaagtgtaaaatatttttatgtgatcaagttatctttttaaaatagtctattataaatatatttttgtaagctttatggtaaccacaaagcaaagacctataatagataaataataagaagcaagcaaccaaagtataccacaagagaaaattatctagtcaaaaagaagagagaaagagaggaagaaagaaacaaaggacctacaaaacaaccagggaacaatgaacaaaatggcagtagtaagtaattacttattaatgattattcaaaaagtaaatgagtaaaattctccagtcaaatggtatagagtgatcaaatgaatttaaaaaaataccaacacacaacttaatgttcctacaagaaacttactttagctttaagaacacacataggctgcatgtgaaagaattaagatatttcatgcaaatgataccaaaataaaacagtggtagctatagttatattacataaaatagactttaagttaaaaactttaaagagaggcaaaggtcattatataataataaagaagtcaattcagcaagaggatataataattttaaatatgtgtgtacacatcattggagcccataaatatataaagcaaatatcaatagatctgaagagagagaaaaattgtaatacaatatttgttggataattcagtacccactttcaacaatgggcaggtcattcagacagaaaaaaattcaataaacagcggacttgaactacacttcagacaaatggacctgacagacatacagaacatttcttccaacaagagcataataaacattcttctcaagtgcacatgggacatgcttctggagagatcatatatttggccataaacataggctcaacaaattttaaacgactgaaatcatatcaagtataattttcacccaaaatagtacaatactagaaatcaataaaaagagaaagattggaaaatattcaaatatgtagaaattaaatgacattatcctaagcaaccagtggaccagagaagaaattaaaagtgagattagtggtgggatccagcagtcccactactgggtatccagccacatacaaaaatgattatatatcaaaaaaacaccagcatgcatgtgtttattgtagcataattcacaattgcaaagatatgtgcccatcaaccaaagatggataaagaaaatgtagcatacatatatatacatatacatatacagacacacacagacatataccatatatatatacacacacacacatatataccatggaataatggtaattgactagccataaaaaagaacaaaataatgtattttgcagaaacttggttggaactggaggctgtcactctaggtgaagtaactcaggaatgaaaaaccaaatattgcatgt

SEQ ID NO: 149 - DNA, 807 bp, Homo sapiens
aaaccataccatatcccaccagagagtgactcctgattgcctcctcaagtcgcagacactatgctgcctcccatggccctgcccagtgtatcttggatgctgctttcctgcctcatgctgctgtctcaggttcaaggtgaagaaccccagagggaactgccctctgcacggatccgctgtcccaaaggctccaaggcctatggctcccactgctatgccttgtttttgtcaccaaaatcctggacagatgcagatctggcctgccagaagcggccctctggaaacctggtgtctgtgctcagtggggctgagggatccttcgtgtcctccctggtgaagagcattggtaacagctactcatacgtctggattgggctccatgaccccacacagggcaccgagcccaatggagaaggttgggagtggagtagcagtgatgtgatgaattactttgcatgggagagaaatccctccaccatctcaagccccggccactgtgcgagcctgtcgagaagcacagcatttctgaggtggaaagattataactgtaatgtgaggttaccctatgtctgcaagttcactgactagtgcaggagggaagtcagcagcctgtgtttggtgtgcaactcatcatgggcatgagaccagtgtgaggactcaccctggaagagaatattcgcttaattcccccaacctgaccacctcattcttatctttcttctgtttcttcctccccgctgtcatttcagtctcttcattttgtcatacggcctaaggctttaaagagcaataaaatttttagtctgc

SEQ ID NO: 150 - DNA, 528 bp, Homo sapiens
atgctgcctcccatggccctgcccagtgtatcttggatgctgctttcctgcctcatgctgctgtctcaggttcaaggtgaagaaccccagagggaactgccctctgcacggatccgctgtcccaaaggctccaaggcctatggctcccactgctatgccttgtttttgtcaccaaaatcctggacagatgcagatctggcctgccagaagcggccctctggaaacctggtgtctgtgctcagtggggctgagggatccttcgtgtcctccctggtgaagagcattggtaacagctactcatacgtctggattgggctccatgaccccacacagggcaccgagcccaatggagaaggttgggagtggagtagcagtgatgtgatgaattactttgcatgggagagaaatccctccaccatctcaagccccggccactgtgcgagcctgtcgagaagcacagcatttctgaggtggaaagattataactgtaatgtgaggttaccctatgtctgcaagttcactgactag

SEQ ID NO: 151 - DNA, 96593 bp, Mus musculus
  misc_feature (1)..(312): "n" at positions 1 through 312 can be any base.
  misc_feature (3386)..(4940): "n" at positions 3386 through 4940 can be any base.
  misc_feature (12981)..(13197): "n" at positions 12981 through 13197 can be any base.
  misc_feature (65121)..(65140): "n" at positions 65121 through 65140 can be any base.
  misc_feature (82761)..(82780): "n" at positions 82761 through 82780 can be any base.
  misc_feature (90594)..(90613): "n" at positions 90594 through 90613 can be any base.
nnnnnnnnnnnnnnnnnnnnnnnnnnnnnnnnnnnnnnnnnnnnnnnnnnnnnnnnnnnnnnnnnnnnnnnnnnnnnnnnnnnnnnnnnnnnnnnnnnnnnnnnnnnnnnnnnnnnnnnnnnnnnnnnnnnnnnnnnnnnnnnnnnnnnnnnnnnnnnnnnnnnnnnnnnnnnnnnnnnnnnnnnnnnnnnnnnnnnnnnnnnnnnnnnnnnnnnnnnnnnnnnnnnnnnnnnnnnnnnnnnnnnnnnnnnnnnnnnnnnnnnnnnnnnnnnnnnnnnnnnnnnnnnnnnnnnnnnnnnnnnnnnnnnnnnnccttggctctgtctggacaggtccagacgactgacaccattaacactttgtcagcctcagtgactacagtcatagataaacaggcctcagctaatgtcaagatacagggtggtctcatgctggttagtcaactcatagatcttgtccagaaacaactagatgtactatggcaaatagctcagctgggatgtgaacaaaagtttccgggattgtgtgttacttccattcagtatgagaaatttactagggcagctaatttgtcaaaaagtctttttcagtatatgttacagaattggacggctgaatttgaacagatccttcgggaattgagacttcaggtcaactccacgcgcttggacctgtccctgaccaaaggattacccaattggatctcctcagcatttcccttctttaaagaatgggtgggattgatattatttggagatacactttgctgtggattagtgttgcttctttggttggtctgtaagcttaaggcccaaactaggagagacaaggtggttattgcccaggcacttgcagctctagaacatggtgcttcccctgatatatctatgcttaggcaataggtcgctggccactcagctcttgcatcccacgaggctagtctcattgcacgggatagagtgagtgtgcttcagcagcccgagagagttgcacggctaagcactgcagtagaagggctctgcggcatatatgagcctattctagggagacatgtcatctttcaagaaggttgagtgtccaagtgtccttctctccaggcaaaacgacacgggagcaggtcagggttgctctgggtaaaagcctgtgagcctaagagctaatcctgtacatggctcctttacctgcacactggggatttgacctctatctccactctcattaatatgggtggcctattgctcttattaaaaggaaagggggagatgttgggagccgcccccacattcgccgtcacaagatggcgctgacatcctgtgttctaagtggtaaacaaataatctgcgcatgtgccaagggtatttctctaccccatgtactctgccttccccgtggcaacaactcggccatgggctgcagccaatcagggagtgatacgtcctaggcgaaggagaattctccttaaaggggacggggtttccgccattctctctcttgcttgcgctcttgcgcttttgctctctggctctggctcttgctcgcttgctcctaaagatgtaaacaatagagctcttgctctgcgctctggcgctctggcgcgctggcgctctggctcctaaagatgtaagcggggggctttttcgtttttggggcttggggcttgcgctcctgctcctgaagatgtaagcaataaagttttgccgcagaagattctggtttgttgtgttcttcctggccggtcgtgagaacgcgtttaagacctgttcaaggaaatgataacaatgccgttgtttcagaaagtacgacacctcgttacccctgttatgaccccttattatgactgccttgcaatcacgtctttgtttcaggttgttatgacaggcatgtcatgcttgttccacttctggggctccgtctacttgcctgccaaatcccccatttggaaccccctattgctgaactatagagacccctatgtcatccaagttcagtgcttatctcttgaaccccacctttagagagatataatttgtgtacacaaataaaaaggttttctataattaatttcttgctttaattaacttggtgttgatgttttaggattgtggtctttctcctcacatctgtgggattaaccgctgtagctccagataccacatcaaggcctaacaatgattagcaaaagaggaaggcttttcctatctctttttgggaaccaggaaactttccttgggcatcttcctgtgagatgtctcttcatgtctcattggtctagcattgctccgatgcggcaatgctagaccaatcaccatcaaggaatgaacctgtctaatcaggactcgttgtgtgtgaaggcaggaggttataacattaaaaccaaacccacaagacagttgtgaggtttttagtgttttggaattagcagtagaaaggctgtgtctatttagagacctgtgtaaagacaatgtgaccagtggagattagtaaggtgaaagtcaacgacttggatagctgaccagaactgcctttgggtattttatacattttatttattatatttcctttcttgttttttctttcaatacaggtatctgtgtatgatcttgaacttcacatcctcctgcctcagtactgaaagctccaggattaggaagtgcactctctgccacacttggccttctttgtatttgagttctttagacaggactggacctgaggtacacaacctactctaaagagggtcagggagaaaagggaagcagctcccccagggtaggggtgcctgcacatcagatgccacgcagctaggagggcatcgctaagcaatagacagttgctccatcactctgggtttgcaggatcacagttaactctttttttctttttttaatggtggaagagagcaaagtacttactgtaatgcggtactactaggacttgtttaaagagggaaaaagccttttaggttttgagatcaaggtaattatttaatggtgttagcttgggttagctgcaatagcagttttgtattgaagcatattttactatttcctgccagcaaaggccagacatggacaagaaggtatgcattaatggaatgacatggagctcgggcctcttgagagcagccgcttctccagaacagagagtgtctctatttcaccaacacactgtgtacacccaatgagctagggacaagcataattgtaatctattttagcagcctcatggctcttaaggacacagaagaaagggagattaagaaatctcttttgaggcccattaatgaggaggaggccaacagaaggctgctaacatattagataagaacacagtttctaggaaatgttatctaaatcatttttaagaaatagagggtatgggagtcccagctgacttgcagattaaatatgcacatctgagctcatgtcttccaagtccctgatatgctataggtaagctatgttttaactacaacaaatccacaaggataagaagaatagaatggataacagcagcagtgtgtagctgctcaaaaacagaagagtgtagagattgtaagcagagtcaagatacgcatgacagatctggggccagccatgggcaggacaagagaactaggttatgcaattgctgggctggtaaattcaaactctgtaaggtggccttgtggtacagaagacgctggagaagaagtggtgggtgtgtgtgtgtgtgtgtgtgtgtgtgtgtgtgtccgtgtatctgtgtttatgtgagcatgtgctgtatgaatttatgccgcagtgtgtgggtgccccctgaagttagaaagaacgtcagatcccctggagctggaggaacacttggacatgagctgcattactgggtgctggggatcaaactggannnnnnnnnnnnnnnnnnnnnnnnnnnnnnnnnnnnnnnnnnnnnnnnnnnnnnnnnnnnnnnnnnnnnnnnnnnnnnnnnnnnnnnnnnnnnnnnnnnnnnnnnnnnnnnnnnnnnnnnnnnnnnnnnnnnnnnnnnnnnnnnnnnnnnnnnnnnnnnnnnnnnnnnnnnnnnnnnnnnnnnnnnnnnnnnnnnnnnnnnnnnnnnnnnnnnnnnnnnnnnnnnnnnnnnnnnnnnnnnnnnnnnnnnnnnnnnnnnnnnnnnnnnnnnnnnnnnnnnnnnnnnnnnnnnnnnnnnnnnnnnnnnnnnnnnnnnnnnnnnnnnnnnnnnnnnnnnnnnnnnnnnnnnnnnnnnnnnnnnnnnnnnnnnnnnnnnnnnnnnnnnnnnnnnnnnnnnnnnnnnnnnnnnnnnnnnnnnnnnnnnnnnnnnnnnnnnnnnnnnnnnnnnnnnnnnnnnnnnnnnnnnnnnnnnnnnnnnnnnnnnnnnnnnnnnnnnnnnnnnnnnnnnnnnnnnnnnnnnnnnnnnnnnnnnnnnnnnnnnnnnnnnnnnnnnnnnnnnnnnnnnnnnnnnnnnnnnnnnnnnnnnnnnnnnnnnnnnnnnnnnnnnnnnnnnnnnnnnnnnnnnnnnnnnnnnnnnnnnnnnnnnnnnnnnnnnnnnnnnnnnnnnnnnnnnnnnnnnnnnnnnnnnnnnnnnnnnnnnnnnnnnnnnnnnnnnnnnnnnnnnnnnnnnnnnnnnnnnnnnnnnnnnnnnnnnnnnnnnnnnnnnnnnnnnnnnnnnnnnnnnnnnnnnnnnnnnnnnnnnnnnnnnnnnnnnnnnnnnnnnnnnnnnnnnnnnnnnnnnnnnnnnnnnnnnnnnnnnnnnnnnnnnnnnnnnnnnnnnnnnnnnnnnnnnnnnnnnnnnnnnnnnnnnnnnnnnnnnnnnnnnnnnnnnnnnnnnnnnnnnnnnnnnnnnnnnnnnnnnnnnnnnnnnnnnnnnnnnnnnnnnnnnnnnnnnnnnnnnnnnnnnnnnnnnnnnnnnnnnnnnnnnnnnnnnnnnnnnnnnnnnnnnnnnnnnnncactttcatatttatgaggtgaaagttctttaccatcacctaaagattgtctcctccaaggtaaaaaagttttgttgtataccggcccgcggcctacttgaaccgggtacacctgggaggcaggctggggctgaaaaagacttaggtggcaagagagattaatggagaccaaggcacgattctgttcaaggccacagtttactaagagagtgtgcttataagggggaaggcccatcccccgccagtccattcttggtgtctggagccagcctgtaggcgacatgcaggataggatgtttctcaggaacatatcaggggtctctcaacaggtagcagtgtattggagagagcagtgtctggtgacagaacaaaagagccatctaggtccgaaggctccaccctaggtaatctccttctaatggcagcaaggtcaaagtctggatcagcctgcttcaggctgggggagcctacaaagttttgcctcgtggatgcacaaaatgtaaatgactctcacagccggctttacatacaccactcataatgcaaggtttgacaaacactccccattccctttggagttcctgacaacagtagcattaaccaagatatccattttattacagggctctagaccttagcacaactgactccatgatggaagtaccactcaggctgtaacactcagcgtgcagccagcaccacctgcccaaatgaaaacaaagacctaatctatcaagtcatatagttctgaggaagtctcaaaatggactcagcttgctttttggtttctgtagttctgcttctggctaactgtttttgttaactgaaatatgtcaacccaggacatggttttttgtgctaaaaagctcactctgagaaagacttggggctacattgggattctgaatacccagtgtggctgccaactggctaataaagactgtctattggcaaaagcctatgactgagcatccttctctggtggatgtcccacaacatttcctcttgttagaatatacaatatgggtgtgcccatccccaatataggggattttgagcactcagggcaaatattctacctttgaactacactcccagccccacagtaaaattgaaatcatctctaaattgcaatacctaacacaagatggatggatggttagaggcttttctttttactttttctttttctttttcttttttttttttttttttttggttttttgagacagggtttctctgtgtagccctggctgtcctggaactcactctgtagaccaggctggcctcgaactcagaaatctgcctgcctctgcctcctgagtgctgggattaaaggtgtgcgccactacgcccggctagaggcttttctgtcctcaatttgttttgagacatggcctccactctgcagtccaagctggtctcatactcatggcaattctacctcagagttctgggagtacaagtatgaccagacatatccagctgtaagtattgcttaaaaaacaacacaacaagacaacattaaaaagaaaattcagtctggttttggtggtgcatgccttctcttccagcacctacaagacaaaggcaggcatatctctgtgggtttgaggccagccaggactacatagacaaaaaaaaatgaaaaaaaaaaaaagttcaaggttggttgaaaccaaggactatgtggatgtagaaccccgcccccctctttctctttctctctctctgagacacatgctgttgccaggcaaacctctcatcacccactcttactctcacaaagtccccccagatgtgatcctgcatatgcagatgtggagggtctgctgataccgtgacctgagatagcatgttcgtggcttcgattgctaccgttttgtgtagagacagagtctggctctgtagctccatcttcttgaatttcatcaaagctgccttgtagtctttctatcttgctgagctctgaggaaggctgtgctgaaggtggaatccagagccttctctgtgctaagctaagctcctgctctaccattgagctgtaacccttccccaatttcctggccttaccgttaagtctgaaaagtgtgaggagagagacccaacctacaaccatctaactgcagcatcatttattttagaggtgcacccgagactgatcagctggctgtcccaccctaagttggaattttagagatcagccctggatatgaggaagacaggcttttatagctcagggtagggggtttccaaatgaggggtttggtgggcaaaatactcagggttacaggagcagaacatacacatagcaagctagttataatgacctgaaacgaagatgtgattgccattcctagaacaggctgtacagaaccatgtgtacttataggtgggacacaggcaaatccttgagaaacagaggctgaatcataaacagaagtgaacctagtttgtttttactatatgatgacttttaagccttacatggaagcgtgctggtctttcacttaccctcagatcagggcaccttctctgcagtcttttctggtcctccacatctgcatttgcatccctgttgtgatagcataacttgagctagcatgttcatgacattgattggtactgttttgttttgggacagggtctggctacgtacctcaggctgacctcaaattggagatcttcctgcatctgcctcccgagtgtttcaattataagcatgcaacaccacagctaacttgtattgctactatgaatattgacttatgtattgtccctctcgacagactgagcccagatgtattgtagttcttcagggcccatctagcacaatgacttgactagggacagagaagtgaagataaacgaaaaaggagaatgtgacatgcaggcacatttagctaagtgttccttcaggaagttgtgagcatcacacttactgcctgggtgcgaccacttgagtcccagtgttgttggttctactctttttggtagattgttcatatcttcttcttacctctattctgtatgcttttccatttgctatttaaaaactgcttaattattggggtctggtgctgcaggcatgctccttggaaggcaagggcattaaaatttcaatgcatagctgggtagttgtgttaaccacctttaatgccaacacttgggaggcagaggtaagtggatctcagagttcaaagcgaggctgatctacagagtgagtttcaggacagccaagactacacaaagaaaccctgtctcagaaagaaagaacaaacaaaagagagaaagaagaaatgaggaggaaaggaaggaaaaagaaaagggaaaaagagaaaaaaaaaaggaaggaaggaaggaaggaaggaaggaaggaagaaatttcaaggcatgcctgcacttcctagcactcagaaggcagaggcaggcagatgtctctaagtttgaggccagcttagtctacacaattaagtaacaggctagctagggctacatagatgcagctttaaaaacattgtatcagtttgtcagcaggatgcctaaagatgcagacacatatagatagtaagaaatttacaataatgaaacacatgagtctagtcatcatctgcagctatacttccttggtttttgtaactcataatagtttagcacaaatgcaatatatagaacttgcatattgtattttggatctctgggtattttcactatatgtgtcctctaacccacaactctccaccagttttctctagatatgaatatttaaattttataaagatcccacgtataagatcatgcaataataatttactgtgtctggcttatttcacttagcataatgtccctaaatggaaagatctggttctttttaccaggctaattactattctgatgtgcatttcccgtctttctcctgacagcttattttcatatcttggctattgtggattatgcagcaatgaacaagggaaagctgatagctttaggaagttatttattaattttctttgggtatatgtcagaggagatgtttctgggtcatgaggtaacttttagtatctttcaaatcctttgtactgttttccatattgttgtaacagtttgaatttactccttaaaagagggaaagggtccggcagtggtggcacacgcctttgatcccagcacttgggaggcagaggcaggtggatttctgagttggaggccagcctggtctacagagtgagttccaggacagccaaggctatacagagaaaccctgtctcaaaaaaccaaaataataaataaataaataaaataaaaagagggtaaggacagatgacagggttggaagagaaaaaaattaacaagagcccactttggtggaatatgtaatcctagtatttgggaagtgtaagtaggtggatcgggagttcaaggtcagcttctcctacacaatttggtggaggtttgaggccaacctgggctatgtaaggtccggtctcaaaaaaactaaaagttacaaaaatagaagatcaggcatcaccgggctgcattcatggtggaagctacccactagaactgaagcttcaccctcggcatctgcatgccagctgaagtatctgagcttgcgaccgattaatgacagtcagcagtggaagaaccgccgaagtttcacaagaatagagggtgagatccaaaagaagaggcccacagacgcttcgcctgatttaccggaactagcaagcctcggctgtcttcaaacatcacaaaatctctaccatgccacagactgggcttcaggcgcctttccctacactaggaaaacaaaaaacaaaaaacaaaacaaagccttactacgccggaagccaggtagtttgccataatcacctgaccggtcagctgcattcggattgggctttagtagtacgtgctcgggggataccgccccagcagctctaggggcggggccaggagccagaggccacggtattggttagatccttcagggattacccaatcagaatcatccttcttgccgcgcagagcgtgcggcgcggggcgcaggagggccgtgtcggcgcgcggagtttggatggtggttccgcccggcgcgacgtaagcctgagtgaggtgagttcggcgcgcgctgggttgcggtggctccgccgactaacagagcccgaggccttggccatttcaccagtcatccgtcccaggttctccgagcctcgcttgtggcgagaagcccagaccggagtagagacctggtgacccagaaaaggccatgtcaggcggccgaggctcgagtctcactgtccacactttccttaaggccttgattgtcatacgcgagaaattagctcatctgcttcccgtagtttgtgtagtgctgcaacgacccctcgtagcaatgcatgctttcgagacgccagaagaggtggaggtgccctgtttttaatcggagaagcaggagctcagacctcgtttgccgaaagggcgcgcgggcttggatgccagatgaggtttgaataggacctgcccagctctgaagcctatctcactgccccaggcttcctcccagtccctcttaactgtcataggttacccgggtgagggtgactgagatgaacctgccatcttccggtgtcgcctttaaatacacagctctcctacctcagcaaggggtaggggtgggaaagactgatcgagagatgacaagatggaggagaaggagagaggcagacgcctggggagtaatacatttaattgagcttggaaggaacttgtctcagccatccagtgctgagttgacgtcacaccgtctcagccatccagtgctgagttgacgtcacaccggcttgagtcaacattttgttagcctgactgctattctgtttggatgtcactttaactttgcttggatgaagtgggatttttaggttcccaagatagggatttagtaccagtttgtttgttttggatcttgtagtccagtttggcctcaaacttgtagagctgagggtgactttggactccatgatcttttcagcctcaacctctcaagtgcttgagttacagacccatgtcaccatccctgttatttaaagtgtatatactgtgaaatatgtacttctgcaaaagagactcacagatttctctgtgtagcccactgtagaccaggctggcctcgaaccctgattccactgcctttccctcctgagtgctggaattaaaggcaatggctgccactgctggacagaatgtagcatcttaaacttggttgagggacatgctctattttctatatttttaccttttgccgggaatggagatgggagtatgttcttgtccatgtttgtgctcatgtgtgtgtatgtgtgtgttaatgtgcaagaagaccagaggtaccttctgcagttgtcttccatcttagtgtttggggcagtctcactgaacctggaacttactgattaaactagcaagcctcccaggactggcattatagatgcacattaccgctcctgactttctaagtgggttctggagatctgaaatcaggtccctatgttcatactacaagcactttactgactgagccatcttcccaggccttttctgtcttaccaggttcaaagtaattgaaaaattatctgtataattttgtgcctaaaagcctttgagtatcttgctttcctgtagaataagatcagttgccactgggaatttcggtggttcacacctatgaccccaattggcactttgaatgagacaggagaatggaaagttaagagcagctttataaagactatcttagaagcaagctacctcccagagcaagcctataatccacacacacatagaaggtggagacagaaggatcagaagttgaaagttttcctcgggtgtatagtgaatttgagaccggtctagactatatgagaccctgtctccaaaacccaaaacaaacattaaaatgctcattacatttataatgtctttctgtcactctggctattattatttttgttattattattaatattattttgggggtggttttgagtcagggtttctcagtgtagctccggctgtcctggaatttactcagtagatcaggctggccttgaactcagagatttgcctgcctctgcttcctgagtgttgagattaaaggtgtgcaccactactgcctgactcataacaaaactttaacagtattttttatttgtgtgtgagcttgatgggatcagagaacaacttgcagttctctgccatcgtgtggggccaggggattcgaatcaggttctcaggcttggccagcagtcttactgcctaagccaaccgaatggtcctgtttttgttttttcacaagttcttaacacattttagttataaaataggctatatagatttttcttaggtaattgtttacaatgtactcatacttgagtggttcacattttttagtttagtattctgtgtagcatacaagcactctaactgtgaactataccatcagctcttggtttttgagacaagattttattatatagctcaagttggctgtgacctggctatccttgcttcagcctcttgagtgctgggattatagttttatgttaccacaccagctctttgtatgttatgttgtttttttttttttttcttttttgcttttgtggtactgggatttgaacctacagtctggtacatgccaggcaagtgtttttccactactgagttacaacctagtagttgataatgtttctaagtttcatttggggctaaagagatggttcagttgtaaagtactttacttcacaggcatgaagaccaaagtttcagaacccacaaagaaaagccagttaagtgccacaaacctgtaatctcattagagatgagccaggagcccgctggccagccagtctagccaaattggtgaactccaggttcagtgagaggaatcctaatgttggtttctggcctccacagtaactcaaatgtatgcacgtgcatgttccctctccctctccctctccctctccctctccctctnnnnnnnnnnnnnnnnnnnnnnnnnnnnnnnnnnnnnnnnnnnnnnnnnnnnnnnnnnnnnnnnnnnnnnnnnnnnnnnnnnnnnnnnnnnnnnnnnnnnnnnnnnnnnnnnnnnnnnnnnnnnnnnnnnnnnnnnnnnnnnnnnnnnnnnnnnnnnnnnnnnnnnnnnnnnnnnnnnnnnnnnnnnnnnnnnnnnnnnnnnnnnnnnnnnnnnnnntgtgtgtgtgtgtgtgtgtgtgtgtgtgtgtgtgtgtgtgtgtgtgtgtatgtgcaccacattcatgcgtggtgcccacagaggtcagaaaagggtattgaatcacctgggactggagttctgaatggttgtgaaccaccttgttggggctgggactcaaacctaggtcctccaccaggtcaataagttctctttgcctctgaaccagctctctactcccctttatgtaattttctaaacaatgtattttacatttatgggcaatttgttagcatgtatgtctgtgtacctagagtgcgcctggtgtctttgggggtcagaacagggcgtcagattccctggaactagtgttacaaatggtagtgagctgtaatgttggtgctggggatcaaacctgtgtccactagaagaatagaaagtgctcttagccaccgtgttatctctttagctttgattttctaccttaaaaataaattttataataaattaaaatattgtgttatgtgaccatacccgtttttattttgttgtgataagcacacctgacatcttctctctgaatggactggttgtctatgtgctttgagacaggatctaactgcatagcccaggctggtcttgacctctgcatgctctccgatttctctggtgaataatatagtatagggggagtgctgcactgcagatctcagcctctcatcctccacacagaaagctaatcagataggatctgctcatttccttacacatggcagctgtactgctgtactgtggctgggcttatgtagtactgtccttcagtaagtggctattttacttagcagaatgtcttcagggttcgcctgtgttgcttgccgtaggactgccgtccttttaaaggctaatgtgccgtttcgtgtatgtaccactgtacagtacaggagctctcatttcttgcccccccccccacccatatcacacttcatttctgccttactattaggtcaggctgccctcatactctcagtgatcctactgcctcagcttctggagcactgggattacaggcatgcaccaccatgcctggccccacatcttcctttcctctgcttcagactctaaccacaaatagggaactccaatattcctcgcaactatcaaacccggctgcaaaccagatttgcatgatagggctttcttttgttttgttttttgagtagttcagtaatttgctaaggtaactcatagacctcagggaaaaccagacatctgctttctaggttctagtttgtttttaaaagggtacctttcaggaaagtggaagaactaacatagtgcaagggatgtgggaagaggtggagccttcataccccaactcgggaattcttcaagcctgtccttttcagggtttgtgcaggctttattgcttaagtgtggttgagtatatcattgtcactggtgactaagtcactcttcaccagtctccccccttggtagcaagagtgtactgatgtacaagtggttgaagtcaagagtatacatactttattttactgtagaatgctaatgttaaatggctactcttccatcactgtactgatctcttgctgcttcacatccttgctaatttatatacacatatctgtatattatatatacaaatattttaaaaatttttttggaggtgggggtctcatatagccagaggcagccttgactcttgcaagtacaggaggtatggacatgcaccactatgcccaactccttcattgttgtttgcatttcactgtgagggtacaatggtcaaggggaaaaaaacaaacaaacaaacaaacagagaaaattacgcccatctctttgttttttgttttgtttttttgtgacagggtttctctgtatagccttggctgtcctggacctcattttgtagaccaggctggcctcgaactcagaaatccacctgcctctgcctccggagtgctgggattaaaggtgtgcgccaccacacccggcccttctttgtttttgtttgtttgtttgtttgtttgtttgtttgtttttaagattgattgattgattgattgattatatgtaagtacactgtagctgtcttcagatgcaccagaagagggcatcagatctcattacagatggttgtgagccaccatgtggtggctgggatttgaacttcagaccttcggaagagcattcgggtgctcttacccactgagccatctcaccagcccccttctttgtttttttgatagaaggtcttactctatagcccaggctggcttgtcactcattatgggccaacaatcttcctaccttagcctcctaagtgctggggttacaggaatgtgccactatgcccagcttagaaggtgccattgttaattttgtttaagaaatctcttgaaggttttaaagttatttctgtaattatatcctagagactttattatttgtctttcatacttaggtgtttggttttttctttcatttagatgagttttacaaatttttagattttaattagtgtgtgtgtgtgaactcgcacatgcactgcaaatagggtattctatgtcctaggctttcctcaaattcgccagatagtcaagaataactgaactttttatcttcctgccttactttccaagtcctgaggtaggtgtgcactccattcaatagtggttgaacactgggctttgtgcatgctaggcaagcattctaccagcagagctacacccccagtgtcggtataaatagctcctgcctgaggaagctccaggtctaacaccaggaatcagaatgactgttctcacctagtgctcaacagtatcatcactatagatcatggatgggtttatgcttgtttgagccagagttttattgtgtagctattgtttttatgtctttctgtatcttgcagagcaaatctcacctagtattgtttttcatgactctgttggctgttttgctattttatatctattataattttacatccagggtgttgatgcaagtgcttgtcattcctaagcctgacatcctgagtttgggttcccagacccacaaaaccagatgcagtggtgcaagtgtcccacttcccagtgcaatcccgagaagtgggaggtggaaacaggagagtctctagaagcttgtaagccaactagccaacactgtggtggagaaaacctgtctcaagcaaggtggaaaggccaggtgccagtaactggggattgttctctacctccacacacatcccacattgatgcagcccagtgtgcacacagatccactatcaagttcccccagaaaaagaaaacagaattttgattggaattttattgtcatagatcagtttgcgatcttggcatcttgagaatattgcttccctatcacaaatgtggctcatttgtcccttatttaattttgtaaaaattacttaatagtttcttgaatatatgtggccatagtttgtcagatatttttggagggtacttaaatgttgataccactgaaatcgagtttttgttctttattttctagttgtccatcagtgacacataaaaaggatgttttgtgctgatgtcttttctagcagtctttcataaaactgctgtaccaaattactacaacttggttgcttaaatgacagctttgtcttacagttcagtacttcagaagtctggatgggcttacctggaataaggactaagttcagtacttcagaagtctggatgggcttacctggaataaggactaagttcagtacttcagaagtctggatgggcttacctggaataaggactaagttcagtacttcagaagtctggatgggcttacctggaataaggactaagttcagtactttagaagtctggatgggcttacctggaataaggactaagggcttttcagagcttcgtttgttcataccggctctagggaaaacatgctcattgcccttgtcagctgcttacaggtgaccatatccctgacttgagatttctttcattatcaaagccaacaatcttgggtagaatccttaaggtgtcagctatctggtctgccaccagatttttctctcccacttaaaaaagacacttgtggttacattggccccacttgtacagaccaggaaagtagttttgttttgttttgctttttcttctcactttaatttttcaccctaaagaccctatttaaaaagcattttaatacttcagatatgtttggaaaacttctttttgtttgtttatttggttggtttttcgagacagggtttctctgtgtagccctggctgactggcaaacttcttaaaataagatttcaaaattaagtcttgagtttggaaatgattttgggaccagatatggtcgggcacacctttagtcctacttcctgggacgcaggggcaggaaagtgtcagtgagtttgccatcagcctggttgacatgaagagttctagaccagccacggctatgtagtgagaccccacagcttccgacaccgatcactccagttcccggggctctgatgtcctcttctgacctccatgggcatccttcacgttgtgatgtgggcaaacactcatacacataaaacaagcaaatatttttttttaaaaagaaacaagttaaaacaaaaaaagagaaacttgtgagtttataaaaccactaaccaaaatcagaacaaaaattcactaacataaatgttgttttagtcattctgtttttttgttgttgttgttgtttgtttttatttctgggtttttttggttttttttttttttttttttggtttttcgagacagggtttctctgtatagtcttggctgtcctggaactcactttgtagaccaggctggccttggactcagaaatccgcctgcctctgcctcccaagtgctgggattaaaggcgtgcgccaccacctcccggctttatttctgttttgtttttgtttttgagacaagagtttctctgtgtagccctggctgtgctagaactcactctgtagagcaggctggtctcaaactcagattcacctgcctccactcctaagtactgaggttaaaggcgagttgctaccagccagtggctattctgttttaggatgatccaccagcagtagttctccattaccacacggccagacagtcacagcttgaaaagattaaggtgtagacctctgtggctaagtagagtatggggcattattctgggttaagcgttttcacagtttaacctgaagattgttttaggtgctgcacacacaaccatacaatttgcaaatgtctatggctttgcttctctctccccaggtacctttcatttgtctgcttctccaattggctcaagttgtaaagcatgtcctctgaaagcagagcgtgggggtggggccgcaactgttgtactgagaacaaacctttctaagcgcattgtagacctgtttgttttaattacatcccttctgtcaggacagggatttccttccattcattgttttttgaccattcattgtggatggatttttatatgtttattctgtggatcttgaggaagtgaccatagtgtttgttggtttgtttgttggtttggttttgtttgctatgatctagtgtgatgagttatcttagttgattgtctaatggtgaactagccttgcagtcctaaaacagcagatctggttttatatgtagctaaacttccttcacacctacatctatgaatgagaattagcctgtgtgtttacggttgcactggattgcagtgttcactgttgggatgaaggtgttgagcaggagaagctgatctgtactttggggttgtctgtatgaaactggagtgctttattgttataaatgctcagaacactctctttttcttccctctcttctttccttccttttttttttttttttttttttaaaaagacaggggcttacgtgataattcagactgcctagaactcactgtagccaaagtggaccttaaactgagcagcagccctcattcagctgccaaggcattggccacagtgcccagcacttttagtttttgtgagacaagatctcatagacccaggttgaccctgaattctttatatagctgaggcttgccatgagttcctgctctccctacctcagtcccccaccaactctacttatttaatcttttattgaagacttgagacagtgaaatcaggtaagagaaattattcacaaggcttggaaaatagaaaaagtactactgccctcaccttcagatgatatggaatttgtctagaacacataaaaataacctaaatagctaaaacgaaaaataatttagcccagcccaatgttacatgcctatagtctgagcactcagaggtgactgcctgagaactagattcaaggtcatctgtagtgacaattttggagttttggcttctttaaaaaacacagaaatataagaatatgtttttggttttgtcccagatgtaggaaggtggggctgcttcagattgtccacatcagctgagcctgattttccttacactgtgtcgggacatgattttgccagctgcaaatagtttctgtggttgtgtgatgtttggaattctggagacatttagagggtatataaatgttagggccctgagaggtgggatgggttgttggttgttagttacagtttattaagtggtcatctacaaagaagaaacaataagaagaaattagatataaggagagtgaagctcaaacttgcctcaagtaacttgatgccccaatcagcaggaagtagcctaatgataaagttgccccccttcctgacctctgactttgtttggggatctctttcctgtcctatcttttttttttttttttcttatctagtgttagggggttgaaagggtgggaaaaagaagaacccacaaagtagcaaacacccggctgcatcattctcagctacatggtgagttggaggccaatctggactgcctgagactgtctccacagcagcacatgcagaggaagagtttagtaagacaacagtatacatttaccacacaaaccaggtgtttaacaaataagactatataaggaaggggatggtctcatagtaaaaacaaaagggttaaaatgtttaggaattctaaaacataaatgaagaaatctttaaaactcagggctaaatgttacaaaagttgcaaggtacctttcccaggatagagtaacctaacacccagagagcatagggtttacagaacttaacacacactcagtatagtttcagtaaagatagctgcaagattttctttctgatgctagaaacgatgattctaaagttcacgtagaacaaacaaaaaacaaacccatgaaaccaggtctggtgtcatatacctgtcgttccagcacctgaatctataactggtagaaagaagtaagtaatagatcacatcagagaccaatgaaatataggaaataaagcagttaagaaatagacaagaccaagagtcgtttctttgaaaagatgtgaaggtcagaggacaacttgaagttcaaggctgctgcctcttgttgatggagtatgcagcctgtatgtgctgtcctaagggaccatggagacagtgtggctgtaaatgtatctgatctaattctgtcactgacataggcttcagacatgtttgcagaccgcccttgggcacagtgaccaggttttcaagtcaatcataaccaaggtgcaggcagaataagcacatttgattaagaacacatttgattgtatgaagttcaaacttcctggctgccaaaagatccacatctcataagtttaatacagattaatttgaggatatggtaactgaaattgcttatctttagtgactttggggtcaaaatgtcaccagtggtggtgccctagacaagtggtagaccctgtactcctaagggcctccactgtgttgagtccacaccctatgttttaattagtgttttcctgctgtgcacagacaccatgaccaaagcaactcttataagaacagtgtacagggtcagaggttctgtccgttatcatctaggcaggagcatgggagagcccaggcaggcatggtgcagaaggaaacaagagttcaacatcttgttccaaaggcaaacagaaagctggcttccaggcagctgggaggagggtctcaaaacccacgcccacagtgacacacttcctccaacaaggccacacctcctcatagtgccatttcctgggccatccatattcaaaccaccataccctaccaaatcatgttcactaataaatctcacatccagttaaaaaattaatactaaaatcatcttcaagctgtaccacaaatcatatatatgttaagaggtcaacatagaatatataaagaactatagcttagcaaattagaaatatccagtttgagccgggcagtggtggtgcacacctttaatcccagcaattgggaggcagagacaggaggatttctgagttcgaggccagcctgctctacagagtgagttccaggacgccagggctgcacagagaaaccctgtcttgagaaaacaaaaacgagagagagagagagagagagagagagagagagagagagagagatcaatcgatcgatcgatccagtttgaaagggcataggtgggttgagaatttcacttagtggttacactttgaaaggcccgaggtttccttctagtaccaaaacaaagcatagcaaaggatttgaatagacattttcccagagagaatacacagtagtcagtaaacacatgaaaaagtgatcatttttgtaaatcattagagaaaagcaagtaaaaaccaggtgagataacttcatatccattagaatggctatcatattacaagaggaggaagaggaagagagagaaaaagctaaaaagtagcaagggttgctaaggatgctgaaaacttggaagccttgttaattattggtagcagagtaaaactggcattccagaggacaggagacagtagtatgacagtatgatagttgctcaaatgataaagagagatttgccatatgctccagtaaatccatttctgggatgtatccaagacagttgaaatcaagacttcaaatgtaatggttaattaatttatttaaaaacctaatttatttattttctgtgtatgattgttttgtttgaatctatgtatgtgcaccatgtacatgcctggtgccaaagtatcagatcccttgagcctgtgttatgaatggttgtgagtcaccacatgggtcttaagaatcaaagtcaagtcctctgcagagctaccagtgctcttaccagctgagccatctctttagccctgtgatagttagttgttagtcacattggattggagagagccttggatactagtaaactctgagcatgtctgtaacagtgtttcctgagatcctaagggatttggcctagaatagattaaccaggctgacctcagactcacagagatccaccagcctctgcctcctgaggggtgtgattaaaggtgtgtgctacagtgcctggcccaggaagttttttcttaattaccgtatcacttgcagtgggaagacccacttttaatctcggtttttgaggtgggaagttaaaatttaaatctgggtcacaccttttgcaagcagcctatatatataaaggacagagaaggaggaagcttctgctctttacctgcttgcttgctggcaaggtcatcccccactggcgttagagcttgcttctcaggattctggtgtgcactgaagactagctgagacatccagccttgtggactgaacaactgctgttttttttggatcttctggtggtgggtaagagccatggttggattagcctttaaatcattacataaatcccttttatatgtacatatagaccatcacatacactcccattttttatacacatatacacatatcattacagatatgtatatcattacataaacattacatacatgtatgcatatatgtgtgtacatgtatataatgtatattatataactattatatataatgtatatacatatatgttacagatatacataagtcattacataaaccctctttatatatacatatagattcattttataaattctgttcctctagagaatcctaatacagtagccaaaaagtagaagcaatccaaatgtccatcaagagataaacataagcaaaatgtaatgtgtgtgtatatgtatatgtgtgtgtgtgtacattgctcagctttaaaggagaaggaaattcttacttatgttactgagtgaaccttgaagatgttatgttcagtaaaataacagcgacaaaaaatttcacttagatgaagaatctaaaagtcagactgtagacagtacttgatgttatctaaaaggaaggcgaaattagaaggcaatgttaattaatggataagtgcctgtgttatacaattaaaacctttctgtgtttgatggtgcaacagtgcaactctcttgaacactaaacatttcatttgtttgtttatttttggtgcatggtgcacatgtgaaggccagagaaccactgttggaagttggctttctcctgccttaggtttcagaggtttagttccagttatcaggctggattagcaagtgcttttacctgctggcctatcttgcctgccccacagagcattctataatgatagtgatagcttgaagcagtaccaatcccattggccaaatgtcaaataatttgcaggtcaaaatactgttatcccttgatatgtatgagagattggttttgagacactctggatatactttaaggattatgtaaaggccatatgtaaaatggcctcatttgctggtgacaagttactgaattttgatcatattaaaatgtacatatatatatatagccttaaatatactaaacacacacacacacacacacacacacacacacacagccttatttgctggattttctgtctcctgcgtgttcagattataggtgtacgccactgtgcctagtcttgtcttgtcttgtcttgtcttgtcttctcttctcttctcttctcttctcttctcttctcttctcttctcttctcttcgtgtgtgtgtgtgtgtgtgtgtgtgtgtgtgagagagagagagagagagagagagagagagagagacagagacagagacagagagacagagagagaaactgaacccaggatccttgtacatgtttggtaactcttgcctgtaacacattattgaaacataacctatttgtaaaaggctgagaattacttgactacatttttactgtagattttttttttaatgagacaaccctatttaaaaaaaaaaaaaaacaaaaaccagtaaatgagaagagtcttgtaaaaaatgggctaagactctgataagcataactaattcaggaatacattggacagctgttttgctactttaagttacagaatgttgcaagtcttgtcctagtttcttttgctgttgctatgctgaaattccttgacaaatgtaccttcagagagaagggcgcacagtccatcatttcagggaaatcaaggcagccacagtgagaaagcagagggatgagtgtgtgcagcttcccagctctctctccactctgggtctccagcccagggaatgtcccacacagagtcaagatgtatcttcccgtttcagttgctgtaatcaatgttttctcacagacacatctacaggctcatttcccaactgatactagattctgtcaagttgataattaactctcacatcactttttctagaagataaactacacacacacacacatgcacatacatacatatgcatttaaaagaacatataataagagtcctatctaaagactctgttcagaaatcgtttgcttagtgtttggtgtcaagagagcccttgtttctagggtctcagataagctttatgggtaatgttcatgtgtgaggctcactacttttgtcccagggaaggtcacctggtaagaggctcacagagcttggctgtgttttcaggaacaacttcctaaaacctctacttttagcagaaaactagagtagacatctgactgttacttggcaccaagtatcttagaatagtcattttggcagtccacctcttgatattctgaaatagctgtcttgttacaacaaaaagaatgaaaggaacatttgacctagaaagaggaggtagtcctaattttgatagatctaaaaattatttcatttatttgaaagaaaaggatcctctactccaccccaaacagcctagtctctctatgccatgtctctgtgttaataaaaggtatatttatttatcttttatttactgacttgatttgactttaagacaatctatgtaacctagcctggaactcactgtgtaggctgtccttaaagccacagagatctacctgtctctgttcccaagttctgttgtgccaccatgcttgacttatttattttgttgttttgttttatcaagacagggtttctctgtgtggttctggctgtcctggaactccctgtgtagaccaggctggcctcaaattcagagacccacctgcctctgcctcctgagtgctgagactaaaggcatgcaccaccactacctggccatacttattaaaatatggtgtacatgtatagtgtatggtcatatgtgtgcttagtgggtaaaagtgcctgctgccaaaattgacaacttgaatttgattcccagaacacatgtggaaagagagaactgatttttacaggtgtctttggagtgccacacagaacaactaaacaaataaatactaaaaagtcaaagggatatacgatagctcagactcagcattggggggtgggggagcagaggtaagccaatctctgtgagttcaaagacatagagaccttgtctcaaaaaaaaaaaaaaataataataagggtgaaaggggagacttaaaaagtatttccctttttatcaaatgtgagtgaaagttggtctgttgtttttcctaatattcctaaaaatgttcttttctatagttctcaaaaaaattggtattcttgtttgttgctttcatttcattgaccttctttcttctttcctccttcctttctttcttcctccttcttttctttcttccttccttccttccttccttccttccttcttttctttctttcttatccactcgaagaatttagactttctttttcaattggcctaattttataagattacctcttaggactctgactgaggaggccaaggctgcagaatcttgatattaaggtcaatttgaaaaatttagtgtgcccctgtctcaaaatcaaagttttaaaagggataagaatgtagcttagtgacagagcacttacctagagtatgtgaagccctacaaaattcagtgttacaggatatttgatcactctgtgaaccccaagattgtgttgtttactggaaaaaacctgtctctagtagtggtgtggctcagccttagcacacactttaatcacaaacaatgaaggtaacatatgctagtttgtaaaaggaagcaccatatttgaaagtgatgtctgagtggcagacaaagtgatgaaacagagaaagatttgacagaataagatatgctcaactctcatgaggacagagagaaaagagaggctacttaagagagcaacacagagagaaaggaggaaggaggcagttttacccggagagttttcagaggcaggtagaagagagaacaagcaaaacatagaccatagacgaagacagaatgcaccaaagaatgagaagtagccagaagattagaacagattgctagagttagtttgaggccgagcagagcaattcagtcagaggcagagaaaggtcagattaaatcagtcagtttagctgggcgcggtggcgcacgcctttaatcccagcactcggggaggcagaggcaggcagatttctgagttcgaggccagcctggtctacagagtgagttccaggaacagccagggctacacagcaaaccctgtctcggaaaaaaaaaaatcagtcagcttggagaggattttgagtcaagtcagctgatttgaaccagacatacagagttcagaaagaacaagaaagggtgagcttattcaacagtaagtctctcaaagaatgaaaacctggctagaagtttccaggactaggcctaggttagcagaaggagacagttcttggagtcaacaattaattcaggcaaataaaagataaatttacacctcagtaccatcaaaagtaaaaaactaccccagaatatcatgacctgataggctccctctgtttctgatttcaaaatctcagtgtcaagacatagttcaaataagatgcctttaatcatttattcttttctttttggagatagggtttccctgtgtagactatgctgattttgagctcactatatagctcaggctggcctcagacatcagtgatctccctgcctcagcctccccaagtgctggaattgcaagtgtgagctgccatgcctggcttgtacttgttcagtaaagttggatgaacaagtaatggattttcttgtaaatttggacagatattatactttagtgtaatctcatattctctgtaaaactgtatagttaaatgaccactctctacctgtctctgttcccaagttttccaatttgtttgattcactacttttactttttttctttttgagactgtgcctcattcggtagcataattttcttcacacatgagctgggttccacataccctgtgtttcattactttacatatgtgtgcatatatgctctgcactcaacttagcgtttgcttactcatgttcttttaaaatatcataacttttatttttccatataaaagatatttttaaccactccccaaattgtgcttgtgattgatacctcatttgtctgaaacaaattccattggccaagcatgaaacattcataagggttctgaaatgccatactgtcatggactgaaacatactgactgtgctttattttttggcttcatactagtacttggaaaaaagaggtcactcttagagataatgaatgattcattctttagactctccgtgtgcgtgtgtgtgtatacacgtatgtaccaccctgcacatgtgacagagaacagccttgggtgtgagtctttgctccttccttgtttgagacagagtctcttcattgttgtccgctctctatcctaggcttgctgactcgcaagcttccagagattctcctatctgcttactatagaagcaccaagattacagatacacactatacatgtattttagtttcagactcaggtcctcacactgagtttacctactgagctatctccccagacctgatttattattttgaaactaataagaaaattccagttactgaattaaaaaattatgactcaatttaaatatcaccgttttcagaaatggacttctagaacagtgtagtgtgacccatctaatattattaatccttcctccaaatatgtatatggtataaaacaaaagtgtattataaaagtaaagtgataaactgggtatggtagcgtttgcctgtaatcccagcactggacacaggaagttcatgagtctgaggtcagccaaggttatatagtgagaccttgtgtattagtcaggatttatgtgtatatatgtatatatgtctctgtgtgtgtgtgtgtgtgtgtgtgtgtgtgtgtgtgtgtatggatttattagaatgacttactgactgtggtccagctaatccaacaatggctctctaaccaacagaagctccaggaaacccagtagttctcagtccataaggctggctatctcagttgatctttttagtgcacactgaaatcctgaagacatacactctaatgccagtaaaggaactgactagccagtgagagcaagtaaggaaagaataagcttcccttttcatgtcctttatataggctgccagcagaagggttagctcagattcaaggtgtattttccaacctcaaagatccagattaaaagtagcttttcccatttcaaattacttaataaaagaatctcttacaggtgtgcccagccatttgagtttcagtgaattccagatgtagccatcacaagtccatcccttacccacttgacataattatatctccttgtgtcctgcttaatttccaaatgaaaacaacaaccagatcataattacacctaacacgatataatgatcctacacacaatcacaaaattcattatatatttaaccaagttataattacacctaaaatgataaaactacttcacatacaaccacaaacacttcttactcattcttctattgccatgaagagacaccagggaggcttgcttacagtctcagaggcttagtccactatcattatagtagggaacatagcagcgcacaggcagacatggtcctggagaaggagccaagagctctacattggatcctcaggcagcaggaacctgtatcctctaacaaggcctcaccccctaatccttctaattctatcagagtcccctccctggtgatatatatgagcctgtgggagccattcttagttaaaccaccacacctcgtatcaggagaaaacaggggcccataaagtggttgagtagaagggcttcctctacaagccaaggaccaggaaagatggacacagagttgccctatgacctccatatctgtgagtgacaggtgtactactccccagtgcacacacgcacatgcacactaatagtaaattttgttttaaatccaagttgagtgggaaagaggatttataattcatctgaaataactttttaaaaactctttatagatcacagctgtctgtctttagctcagtggtttcaaggtggcttgagctgcgctttatctgggtgaaagtgaaccagtgcagcaagtgttacacagggatataaatgtgtgtggcagactgccgtggactgggggcgactggagcatggctctggctggtcagcctttgcactcgcctgtgggaggcctgtctttactggacctttagttttgcacagagaattcacgtcctggctgtcccccgggttcctagtttgctttgatcattactccctctcattccctatgtgccctccaagcctaggccaggctgtgctgattttagcatctgttgaagaaaagaggaaaacaggccattttgctattcaagtaaatctctagttaaaaaatgtgtgttttaaatgccaccagatgtaaatgttaaagcaatctgttgacaggaggaggaggaggaaggggggcagcaaaagtgtgttactctgggcacatctggaatgatgtggcggtttaagtcttttacctcctcagtaaatatgctgaatgatactaaatgcctaactccattaatggttgccctcttcctttttaggatcatggctgctgttcctctgaacaatctacaagaacaactacagcgacactcagccagaaaacttaataatcaacccagcctttcaaaaccaaaatctttgtaagtatgttcattctcatgtagaagacagctcaggtgtcatacaatggagctctcgcctttcacctctgtggagtctgggatagggtcccatgcatagcccctgctgactttgatctcactccagtccacacttgcctcacacttgccacagtcctccctcagccgtgtctgtgctcagatcaccaccacaccaggcttcctccagctctctcatttcacagaggaaatgaggagcccagtggttttccccgttgcaagttaatagtagagcctgtgctagcagagctgagtgtgattgttctagctttacacaggtcctggcacgtacttgttcagtaaagttggatggacaagtaatggattttcttgtcaatttggacagatattatgctttagtgtaacctcatattctctgtaaaactgtatagttaaatgaccactctctagttctgtgtctcctgcaagctaagccccaagttgctaagatatctaataatacactgtacttaggttgtgccctcaccagatagcaagcactgctccatgcctgcagatttaaagttacttcaacttcagtcactaatgtcagcagacagcctctgcctcatgtgtccttcagatcttagcagcttttctaaaactcctttctcccttaaacattttttttgtcacagtagcaaattccactctgagtctgtctgtctgtctctcaacacatcctgtcttttgcttctgaagggactattaaggacctccagcctgagaaataaagtgtaggagtggcctgggaactctcagtgcccagtaactagcctctgaatggaaaggattagagcgaccaaatgtttttaagtacctggtgaattttcaaaaccacagagtgagacagattcaatgctcaatacaattaacgtgacttgcacttgaaatgttttataggagaatgaatttgttaaaatggaaatgagtccatcagggcctgggattataagttatgataaaatgcttgcttagcataaatgaggccctgggttcagtcctcagcatcagaaacaaatgaattcactaactgagtttttccattatttttcagaggttttacttttaaaaagaaaacatcagagggtgatgtgtctgtcactagtgtgtccgtagtaaaaacacctgcgttaagtgataaagatgtgaacgtgtctgaggccttttcattcactgagtctccactccacaaaccaaagcagcaggcaaagattgaaggcttctttaaacatttccctggaaggcagcaaagcaaggggacctgctctgagccgtcactgccggccacggtacagactgctcaggacactttgtgcactacccccaaaacccccactgcgaagaaaccgcccgtggctgttttcaagaaattagaatttagttcttctgcagactccctcagtgactgggctgatatggatgactttgatatgtcagcatcagatgcgtttgcttcactggctaaaaatcctgccacaagagtaagcaccgctcagaaaatgaaaaagactaagagaaacttctttaaaccaccacctcgtaaagccaatgcagtaaagactgacttgactcctccctcccccgaatgcctgcaagtggatttaacgaaggaatcggaggaggaggaggaggaggaggaggaggaggcggagggggcagactgcctgagcagggatgtgatctgcattgacaatgattctgcttctgaagagctcacggagaaagacacgcaggaaagccagtctttgaaagctcacttgggagctgaaagaggtagccatcatctcatcttcgtttcagtgctttctaatctaaagctgagcactgggagcagcggtacacaggacagttgtgtccttgagggtcttactctctgctctgctgggcttagttctgtgactttagacatgaagaaggtcggtccgcagaggttgaggtggaaagggagacaagccttcccatgtgtaatgtcttagtggcttgccaccacagtgcacatgcagtcctgacggtaacacccggtcatcctgttgactgcagtcgtgtgtcacttaataacaaggatgtgttctgagaacactacatcctgaggccctgtcaggcagacatagtgcacttgcttaaccagatggcagagctgaccacacacctcggctagatggcttgcctcctgcctggaggctccaaaccacacatctgcgagtactgtagttgtctgcagtacaatgaaatacatttgtgtccacatagctctagatatataaaaggtacagtaaatataaataatgattttttttttcaaaaattttgtgtactgactgaccaaagtacacgaatggagctggcacacctagaagcttctctgagtgagtgggaagtgacgggaggctcggggtgctgctagccatttcagtatggtatccatactgcgcttagcccagagcagtctcataataaggttaccttcctcaggaattacttttagttcattgtaatttttaatcctttaattcttttaacaacacttagcttaagccatagaaagcattggttgtacagtcatgtaaaatgttttatgttatactggttagttttatgtcaacttacacaaggtaaagttatttgtgaaaagggattctcaattgaaaaaattcccccaccagactggcttgtggtacgttttcttgattgttggctgacttaagagggcccagctcactaagcagtgccacacctgggctgatggtgctgggtgctataagaaaagaagatgagcaagctaataaacagtgctcagtggcctctgcaacaattcttgcctccaggttccttccctgagtctctgttctgacttacccggagggtgaactgcgagttagacgatgagaaaccttttctcactacgttgcttttgatcatagtgttccatcaaagtagtaaaatccctaagatgcatgtacatgatacatgtgcatatatgcacacacccccaccctaccccatgtgtgtgctttatgccttcaaaggccagaagtcatcagagtccttggaattggagttacagatagttgtaagccatcgtgttgttgctgggaattcagtccaggacctctacatgagtaacaggggatcttaaagtgctaagccatctgtctagccctggtcttaaattcttgattctcctgccttagtctcctgagtgcaaaaattaaggttataagctaccacacccagttcacccttttcttttcctttgtcccttccccttcttttcttccctcacccattcccttccctcctttcttttatctttcctttcttgttttttgtttttgtttttcgagacagggtttctctgtgtagccctggctgtcctagaactaactcactttgtagatcaggctggcctcgaactcagaaatccgcctgcctctgccttccgagtgctgggattaaaggcgtgcgccaccacgcccggctttcctttttttattaatgttctttaaaaatgaacattagcttaacacacagtcaagattttgagcatcactgtcttctataatcgcgtctcttcccccaagtaggcctttggggacaagagctgaaaataattcttcatcgtctgtgcattccttttgtttgattatttgtttcctttattttactttatacgcagtggtgctctgcctgtatgtatgtctgtgtgagggtgtcagaagctctgaaattagagttacagataggtgtgagctgccatatgggctcagggaattgaacctgggacatctggaagaacaaccacttaaccactgagccatctttccagcccattgtttgttttcttttttctttttgttttttcgagatagggtttctctgtgaaattctggctgtcctggaactcactctgtagatcaggctggccttaaactcagagatctgcctgcttctgctgagacttaaaggtgtggccctctactgctggctttaaaattttttttttaatttgttcagtggccctgatctggactcaaagccttaccccctctttccttgttttttagggattgaaccgtaggccatgcacattagacaaacactatcattgaattatagtttcagccttttagttattgtttattttgtgacaggatcttaccaaattgtccacatatactttaagcttgcagtttccctaccttagtcttctgggtagctgcttcagcctccttagttgctcagagtacagatacataccacatccagagtctataaagtttttgaacatccaggtctactaaaattgctacacaatgagagatgactgaaaaaaaaatgatgaaaagtgataacaataataataacaaaaacaataataacaaccagcaaataataaaccagcaaactgttgtttaatctattatgttgctgtttctcaagagaatagtaggcagatggtaaaaagtaaaaccagagagcaccaggagatatggtggtacagctaggacagttgtgtgatagaggagattgttggtctgtatagtagcagtgtgtatgccggctgtgtgacacatctgtgatcctggcatcaagaggcggaggcaggaagatagagttaaaagtctgtctcaaaccaaacagaaagaaaacagacccaccatgtttgtgctattaggcttccctgctgcatattactcttatttaaatgtgagtagaaaacaaaagaaccgaaacaggagtttcataatttaactacagctaggttgaattccctaagcaaatccttggctctagtccagcttcagctttctaacagttgtctcacttctttgtgaagaaatcagccaacactaacctgcacaagattcccataggaagtgttctgatggtttatggcttgcccacaaaccactcactcatagggactcatgcccattctgtctcattgattattaaaataatctgtgtttatcaactgtttttctgtaggtgacagtgaaaagaagagccatgaagacgaagctgtgttccattcagttcagaacactgaatactttgaacacaatgacaatgattatgatatagattttgttccaccttctccagaagaaatcatctccactgcttcttcctcgttgaaatgttccaggtaaaaataatcaataatcaatattcttgtttgtttctaaggtgctttatgtaatgtagcttagctagagaatatcatttctatataagtattctttgtggttctgtaatttgttttgtattcaaatgaaagcatcccccccaaaaaattgttacttatttatttggttgtttaagaactattcttagttgggtttggtggctcatgcctcgagttccagcaccggggaggcagatcagacagatctgaggccagcatggtcttccaagtgacaatatgtctttcaaaaacaaaaaacaaaaaactcttactatgtacctgaagctggccttcaattcaggatcctcctgccttagtctcccaagtgccaggattacttttgggaactaccacacttgggggaggggttactacttaagttttagtaatattttaaagcctattctagagacttcaggcagatccaaatctcagcccagttatgtggagagatcactactatatcgtttagccactaacttgagagaaacatccccatagtgtatcgtctggattaggaaaaagaaggaggggttttatatgcaacctgtgcagtccttgtgctttgtgccttaacatttttattattggatttattcatttatgatgtgttttgcctgtatttatgtatgtgaaccattattatatatgcttggtgcccaagaatgtcagaatgaggtatcagatcttctggaactggatttaggagaggttgtgcaccgtcatgtgggtgctgggaatgaatcgaggtcctctgcagggacaaggtacttaacctctgcgccatctctcccgccctggtttgtgctttaacagctgtattgtgctgtttggagaagtggtgggggtcgaagtgtgattcctgttttgataaatttatggaaggtaatatgtggctaagatccatgtggtgttctttccttagcctgatgttttcatgttgactacctagctttattctttttttttttagttttgtaatagatttatttttaaagggtaaaacactcagacaatttaaatacaagttgaacagagccgctgtcaggccacgataccatcatgtgtcctctggagtcctcacagtgaggaagaaggctctgatactttattcatacacatccttcttatctgcaatgtaatctacaatttcttgtggacacattaacttctctgcatctatatcaggaatttcaaacccaaattcgtcttccatggccataataatttccacttggtccaaactgtctaagcccaggtccttcataaaataagaatttacggagagcttttctggatcaatcttatcatagagtttcaagacatacagaactcggtccttgattccgtctaacgtcagtgggggccaaggcggactgcagagccccgggtctcctccggattccctcagggcatagggtggtgctgagcggccacgccaaggccaacgtgggaagccggggcagcggcgcgaaggccgcgggcaggcggcggacacaggcgcagaggacagagacgccatggctacgcccgcctagctttattctttattaaatatgtttgctgcacaaatgatgttgtagccaccttaactagaattttaaataagagggaagaagtatttttagttccaagattctaacaaactgttttcttgtccttgtttggtttccgtcttcctctccatctgcttgatctgactgttgtaattgatacagctgtaatttcagattctttctctaacattattctccatagtgttacatttaaaaattaataattttgccaggcagtgatggacaatacacatctttagtcccaatagttaggaggcagaggcaggcagatctctgtgaatttgaggccagcctggtctacagagtaagttccagggcagccagggctatatacagagagaccctgtgtcaacaaacaaacaaaacaacaacaaaattataatttcataactttttgaattcttataccatgagtaagttcacttagtatattacttttctcattgatgtggcaaacaacttgtgggagtaaggatatattttggctcacagtttcagaggctgctggccatgctgataggagtggcatgtggggtaggagcttaggactgttactgtcacaggttggtgggtcaggaaggtcaagctaaactctcaaggtccatgcctggtggcctctatatgccatctaggccctgtgtcccaaagatttctacaacccatcaaaacagcatcaccaggtgtccaaacatattaatctttcagatccaatgcataatatttagatttttcccaattagaaatgattatttacaaggttgatactttactttccagtacagcctaatgtgactgattgtacagattgtgtgctagttagtgttctgttgctgtgaagagatactgtgaccttataaaggaaaagcatttcattcggttcagatgtttagtccattattgtcatggcaggaagcattgtggtgcacaggctgagatggtgctagagtaactgagagttctacatcctgatcagtaggcagcagagagggcacactgggtctggcttgaacatttaaaaccttaaagcccaccacccagtgaattacttccctcaacaaggccacagctactcaaagaaggtcatgcctcctaatagttccactccttatgagcctatgggagccgttttcattcaaacactacatactgtaaagttgaagtttcttgaattcattatgtaatatatgcttaagttttatgcatattttattcattattatggctcttatttgttatattttattatttatttttgagacaggatctttgaccagtttggctaggctttctatccagcaaccccttatagacccacctgtctctgtctcttgggtttgtgaagtggatataaactcagctgcttatgtttgcagtgcaaggagctaagcagtcctgccagccctgtgtttgttttttagaagagatctcaacttcaactcctttcatagccaagaatgacaagagttgacagggtctcttgggaccagaagacggaaggcttcagggtcagttaaaaagagatacaaaaatgtttcccagctagatgtggacgagaatgtaatctcagcgcttgggaggggagacaggaagagccagtctaagtaagccttggccatatagcaagttccaggccatcctgtgctacttgatccagtctcaaacaacaacaacaataaaaaacaactgtcctttatctgttacatatctatagaaaaatagtgggaggccaagtttgcatttctgttgtccagagtatgactgtggtaactgttttctcttgcagtatgttaaaggatcttgatgactctgacaaagaaaagggcattcttagcacctcagaagagcttctgtcaaaaccagaggaaatgaccacacacaagtctgatgcaggaaccagtaaagactgtgatggtatgaaaacatacttcagttacttcaagttcacacacacacacacacacacacacacacacacacacacgcatctttcaagtcttctttacaattacagtgacgtttagatcattcaactccttcgttgtatatgtcctgatttgtgggggggggctggatggccattgcctgttaaatcactccttttcgtatctttaatgctgggattaaacccagggcctctgtgctctacagcttatctgtctacccagtcgtgcctcagttctttctgattcattcatattcattctctctcttttttcctcctttccaagtatctagtataaataagccaacttttatttattcagctcctggaaacacaggagctcttttctgttctctgagtatttctgtaggttgtgagactcttgacatactcttgagacactcataaaacacatccacactctcctgcagcgcgtgtgcctgtgtgtggatagtgtcatactctcctgcagcgcgtgtgcctgtgtgtggatagtgtcatactctcctgccgcgcgtttgcctgtgtgttctctgctgtttgttctccccaagtttattttttcattttgatctctgcttttcttactggaaatgtccctgaaaatcttcctcactcttctaagagccctacagtgcaaactgttgaatcctcttttcatccccttaaggtagttgctgttatctctcattggagataaagaaaaaagggaactaaggtacaggagaattaaataattaagtagctgcagaagtaaggctgcagcagagctgggatttgaaccagcagcctggaggctcttaaatttcattctggtaaccatggtactagcctgtttctccatctctaagtttccctattacattggctccaaggataaggatgtggtcagaggccttttgtgtcatgagagacttccctcttagctgacatcatataattatgaacctttcttcaagatatttctcttcttctctatggaattacaaaagaccaggacacaggactctagaaacagcaggtctgaggcaggaaaagtgaagggatgctgtgtcagctggtagtgcagccctgcagcagaagcctgactcctgctcccacgagtgggactgcactttaactgaccctccttggaccttactgagttttgggttttttagaataggggtctcacactgttgctgaagccgcttccaccttgtgagagctgggatcataggcaggcaatactgcacctctctcaggtgttcttgtagaaaacaaagaatacctgccttgctggatagttgttagatttcaagtgtactgtaggccttcagtaaacggcagctattattatatgccagtcaagtaatctttccaagaaggagcattaagatggctattgtgtttttatgaactctccctaattccataattgtttcctcttcttagagctacaaagcagcgttttgataacatgttctagaattttgccttgagtccacacgaagattactagtttgtagcttttggcaaccaccctttcttttcccttgaaaatcagaataatggttgtctgtcgtgtctttctcttaaggccttggtcaagggttttcctgttcgtctgagtgagatgtggcccgtcagcagggaaacttgagctccttgccattgtaggcactggtgtctttctgagcctgccttggctttatgtttcttcagacgactgtgcaccctccttcccagtctgagctccttacataggaaagcaacgtgccataggaactcagctgctcacagccatgccctccacacagctctcagcagacggtcgtacttcctggctctcctgcagaccgttgtcctcacagtttttgtatgcctgttttttcctcatgtcttcctcctgccccttaaacccatcagctgtttttctttttttcttttttgagacagggtttctttatgtagccctggctgtcttggagctccgtctgaagaccagactggcctagaactcagggatcacctgtctctgcctcccaggaactaagattaaaggcgtgtgccatgcccagcccccgatggctaattccatctgtagccatgtgctctcatttttcttctctgagcacttctgtcctttcttatttccttgcctccagagaatgctgtctccctggagcccatgtaaattgacttattttccctttgtattgtaaacccttgacgctgagtgggcactttcttggcttatgttgcttccagacctcatttgtttcctatccttcatctgaaacatcaactcctttgaaattacatctcttagttgtatgggttaataaagagaggggtggagaggccagtgaggtagcacactggtagagtgcttgcctggcatttcagggctctgggttccagcctacttgatgtttacttaccgagttacttatttataactgctttgtagcccagcagatacgcatacagcagcagcttattcatgtgatggagcacatctgtaagttagttgatactgttcctactgatgaactggaagctttgaattgtgggaccgaattgcttcaacaacgaaacataaggtatcttgattatcctcctggaacataattgattgcagttccactactccaagtaacaaaatgggcaaagtgtccaggttgtctggcctagacataaggatgatagtcacatcgctaaactttaaatttatcgaattttcaaaccattcatttcatttaagattcatattcacatttttgagacagaagagggggaatttctatagtttctgttggggttaaaaatgaaggtaaactttatggctgctatagcactgatcatatttattgtgctttctttcttcaggaggaagctcctagctgaagcaggttttaatggaaatgacgtcagacttctgggttctctgtggaggcacaggcctgattcacttgataacacagtgcagggcgactcctgccctgtggggcatcctaataaagagttaaattctccataccttctctcacattccccttccactgaggaatgtttacccaccaccactccaggaaagacaggattctcagccaccccgaagaatctctttgaaaggccgttattgaattcccatttacagaagtcctttgtaagtagcaactgggctgaaacaccaaggatggaaaacaggaacgaaagcactgacttcccaggggagtgttctcaccagcaccactgtgaaagctcagagtaaacaagctgcttcaggatggaacgtagagagacacggccaggcttcctatgatatcgataactttaatattgatgactttgatgatgatgatgatgatgatgatgactgggaaaacataatgcacaattttccagccagcaaatcttccacagccacctacccacccatcaagggaaggtgggccagttaaatctctctcagaaaggatttcttcagccaaggcaaagtttcttccagtggtatcaaccgctcaaaatacaaacctctcagagtcaattcagaattgctctggtaagtctaaagtaaattgaatgcttagatattataggaaaacaaaactgtccaaaatagaagttgtatagcatagcagcagtcattgcctgagcgctacattgtttccatgcaaatttctactgataatatgaattacaaatcacagtttcaaaagcacgttgctcttttgtctctgtagcagctgtaggtttataaatgtgtaattataacctattgtagtaaagctctaaagtcatcccaaatgcctttgcctttaaagtaacagcttttactccctaaaacaataaagttcaagggtgccaacattttactgatttggaggtaggcaaaataaaaaggtgaatttatatactcaagatatgtatatttttagaattctggctgttgtgaagtacttcatttataagtagaaaattgtcaaatgtctcacactattaaaatgtgaagaagcataaggttgtggaatcagaaattcaatacatattaagttagtcatggtggttcacatctgtaatcccagcatgtgggaggctgaggcaggaggatggattatagagtgagaccttgtctcaaaacaaacatttcctaactgctcagtaaaggctccatgagccatgtcctgaattgggcttgggaatttttcaaagaagcaatgctggagctcacagtttagtgaggagtgaactaagctactgcagaggcctcagaatgaagcctaaattaattttaaagccttacgtcagccctataaagttatctcaaagtggttttactgaaacaagaatacatgtgcaaagttttatgaagtacaaccctccctatttttgccattgatgacttaatagctctgagtttgttcttagagtgatgctgttgacctttaaaatagccactaatggatttattttggtatgttagaatgtgtcatacttgatgtctgcaattatctttgagacagttgagtgttggagtgagaggagctgccagagcggctgtgtgagagcctcttgttctctagaaccgacgctgccccagtaagaatgcaagcgggagagacgtgagagacagtgaaggaagcatctgagaagttcaggtgacactgaggtttcagactgcggtgactgtgacaccattcacagaaagggaagtcacaaggatgagtttgatttagaaagcagttgagaaaggctattttcagactgttgaacttaaacagttgggaaatcattcaaatagacgtgtctttagggtgtgtgtagagatggcttgtcagttaagagcactagctgttctgaggagcgggcttaggtttccagcactcccaactccagttctaggggagccaacactatctttttggcctcctcaggcaccaggcaaatatgtgatacatagatatacatgcaaacaaaaccctcatacccatagaataaaaataaaataaataaaaaaatatttataaaagaaagtgaggactggagagatgactcagcagttaagagcactgactcttccaaaggtcctgagttcaaatccccgcaaccacatggtggctcacaaccacctataataagatctgatgcgctcttctggagtgtctgaagacagctgtagtgtacttatatataataataaataaatatttaaaagaaaggaagaaggaaggagagagggagggaggaaggaaggaagaaagaaagggagagagagaaagaaaggaaggaagaaaggaaggaaaggaaagaaagagaaagaaagaaaagcaagcagtgtcttacaggcagttggatgtgtgggatggaaacttaggaggatgtcagacagccagtcattctctgtatacagatgatgtttaaaatcacaggactagaaaaattccaagtaagaatatatcaagaaaccagtccaaaatatttgaaagactgccaaagttgagagcagaagtggaactaagaaagggaattcaaaactggtagggtggctggtcacaactcactgtgtgctgctcactgctgtgtcctggtgatagggcactacagcccagcatggacaaaccctaggtttgctctgcagcacagcagaactaaaacaagtagaaagggtacagttatcttgaagaccaaaggagaaatggaaggaaggatgaacaaagtgtattgtaggtactacaaaacaggaaagacttgattagacccctaggaatgtctgagactaattggaaaggcagccatgtaaacagtttaaagtgtgccgttgggtcttcaggggaaaggtaaggctaaactatgtcactgtgttcatgtactgatgatttttaaacattgattgtgttgtagataagctggcccaaaatttatcatcaaaaaatccaaaacatgaacattttcaaagtcttaattttcctcatacaaaagaaatgatgaagattttccataagaaatttggcttgcataattttagaactaatcagctagaggcgatcaatgctgcgctgcttggtgaagactgctttatcctaatgcccactggtatgtatttttagataagacttggcaggagtccattggcagatgttaagtgaaagctttttaatagaaataaaaagaacacctcacattattcttactgtgtagggacccttcagaccccaaaaccacagtaagaaagtgtgttacctcagcctctgctctgattagtggcatggtaagcttcatagttgcttaaggttgttacctcaaagctcattggattgacctgatgtagaactttttcttgggaaattttttttttctaatctaaatagcctagaagggaacagaggatggctgtgagcgaccaaggccatttctgactggtgctttgttagtgctgccgggtggttctgatcttccactacagagtggagccctggagttccagtgtagctccgcccctttcgataagggtgtgcccacggacaagccacctctctctttgtggctacgttcaggacagtaaggagtagaatgcctacttctcagatgaggatcaaaggaaaaggatgcagcatggttcgttcttagcctaggctttgaggagactggggctgtgcgttgttataaaagcctgtaagctactcagtgatttcaaatcaaacacataaggacattatctgaagccttcagttccagcgctcgggaggcacaggcagtcagatctgtaagttcgaggccagcctggtctacagagtgagttccaggacagccagggctacatagagaaaccctgtctcaaaaaaacaaagaaggatgttagctaagcagttaggctaggaagcaggttcagttcttccatgtagattttctgtgtgttgtttctcctgttagagactttagcaagtcccagttggtgctgctgatattatcacatactattgactagacatctgaatttattcaaactgatttagatttttaaaaaattattatcacataattctatatgtgatggggtgtgagggagctgcatgcacaccaaggcatatatgtgaaggtcttgtcagacttgtgcagcaatcttttttttttttttttttaaagatttatttatttattatatgtaagtacactgtagctgtcttcagacactccagaaaagggcatcagatcttgttacagatggttgtgagccaccatgtggttgctgggatttgaactccggaccttcggaagagcagtcgggtgctcttacccactgagccatctcaccagcccttgtgcggcaatctttatccagcccctcaaactggtttatattggacagcgatatcttatccacatttcagactttattaacttagtgacactgtgcctccatttcaaccctagtttggtccttgaaagctctgaccttgggaaggactttggcagtcatctaatcagaggctttcaatggctcttcccagcttcaggagttattttcaagacctttccactctgatttcaacctcttgacagatataataaaaatattccaaataaagtttcccttggacagctctttagaccattgacctcatggatttttcaggataccagggcctaggcaggctaaatgtcatgtctgagttcatgcagctggcagagcaggtctctcttctcagcatcccactatttctttgacatgtctacatacatgccaaaatgaaacttattcactatgtggaaaaggaagagtgtagtatatattttaaaaataaattgaagtcctaaaaactacctagcccagcttttgccattagtagattggtgaaattgcaaattaactagaatataatcatgtagttattttaaaatatgttcttgggagctggaggcacagctcagtagtagagcacttgcccactgtgaacggagccctgggtttgagccccagcatggggcagggcaggcagggaaagggaatgcgtacatatgtagctttcccttttatttcaaaggaataattttgataataataataatggtagtcacagacttaggattttagagaccccttatattgctggaagcaaaagtttattcagatttctctggtagactttttaaacagttctgttgagagttcatttaattcattatggcagataggtagatagccctgtgggtaatactatttaatgccctgaaaattattttaaatattatattggttttctttgtaacttttaccttcacactcaaattcgaaactgacatgtttttcattatttgtctcttaggaggaggtaaaagtttgtgctaccagctccctgcctgtgtttctcctggggtcacaattgtcatttctcccttgagatcactaatagtagatcaagtccaaaagctgacttcctttgatgtaagttattacataaaactattaataaaaatgcaccttagaaacacatgccagtatgctaggaaatcttattaactattgtttaaattattaaaataattattctgggtatatagcttcatggcagagtgtttgcctaacatactgcaaaaaataaattaattaattaattaattaattaaataaagcatacagttaaattaagctgtagagttaagtacatgtgttaaaacattgtgattcaaatagccatctgtaattcaaagaatgtattttattaagaactcttagcctacattttcctgatgtgggttttggggtggtttgtttgttttactactataaagggatttctttttttggctagtgatcatcatagttctctttcctatgcacatgtgtgtgcctgtacacctgtctttttcctcattgctgagttgaggaattatgactgctgcactctataaggttaatcattgcaaagagttggctacagggttacgaatcataccatctcagtgtgacagctggtttgacttttcttctaaagaatgtcattgcagtgttgataaccattgcccagctgttcaccttgttctaaccaacagttaccatcacagcaatgagacctgtaaacgtagccaggccgaccattgtggtgcagacctttaagcctcagcactttcagaggcaaaaagaggttcctctctgtcagttagaagcaagcctggcatacaagcaaatttggggccagctccagttacacacacagacaacatggtcttttttacagatagaggagatgaaacatagaaaatggaacagtggagagccttttgtagtttttcttgacacagaagcatcttgccatagcacaggctagcttcagatttgccggatggcaaggctgccttgaattcctaaacctcctttctcatcctcctgccagctaggattcctcatatgtatgccaccacacctaagtgggaaagctattttgagttgcatttaatgttaatttttaaaaatatgtgtactagctagatgtgacacatgcctataattaccagtactttagaagctgagggtacaggagggtcacaagtttgagactcaaaagtgaaactcttgactcagaaaacaaaacttaaaaataaaaatggtgcattgattgttatggtgaggtatttgtttcttttggaaagtgtgatatatgacttataaaatatgaaacctaagcacgatcatatctgattaatgtataaataaaatgaaatttaaattattactcttaacttagattccagctacatatctgacaggggataagactgactcagaagctgcaaatatttacctccaattatccaaaaaagacccaatcatcaagcttttgtatgttactccagagaaggttcgtatttatctcactctcttcagtgtaatattgcaacgcactcaaatacatatatttgaagaatttggtgataatttttatatacattaatgaattcttgtataaccttcactccagaccacagatggtaaagtcttctctgcctcctgtgttgtttgttctttctccagtttgttgtgaaacacttaattgacagtgagttgcagatctgccattttacctctcctttacctcactctgcatttcctgactgtatagcactcccttaggaaccactgtaatttacccgtcaggaaatgtacagtgacacatactgttacttaagccattaacctttcagtaatgacctttgtaaaaaagggaaaaaaagaaaacccctatttcatctcctatctaaacagtttcattattttgacattttgaagcataagggccagttttggggactgtgcctcaatttgaatttgccttgtttcctgctgattaaatccctattcctcacgttggcagggatgccacagatgtgctgtgtgctatcagaagacagttggcagtgactcatcccattaccagtggtggtcactggccaatcactcgatcaaaatagcattgccaggctgctgctcgctgggcttaacgtttccttccccttccagctgcctagtgagcagttgctctgttgtaggaggtctcagactgtacagacaccgtggcagacatcagagcctccccacaagctttagcatcgttgatgatttgtttcttattattactatgatgagtgccaggttgagtttactgatacaatccatcctggctttatgaaagccttgcctgatgctgcgtatttatcagtgtgaacttgtgggttctttattagtttagtaaattataatcattttcactatgtattttgatgttctaattgcctatgttcaaccagtgaggacgcttcatcaacctgacttctgtgtcttatgtccctgttaagatatgcttgttattggcacatagctatctatatgtgtaatacatagagttcttccccaatagtatgcacataccaaacacacatctaaactcccgttatcaggctggcggttgctcatggggaatgtgcctaaggacctagaaccaaccaccttaactctgaattcacgcatatacatcattgtgtgcacagacccaccctacacatgcacaaacacaaaatgaatacatgtaaaaaaatgtaagtcctgtaaccagagtaaacatgtggtaactctcagagctactagcctgataagtaaagctgttggatgtggatgagggcattgaagtgtctggattgccctttgcttttctgctctcttcacagactgaggacagaatcactcgtgtgtgagtagttctaacagggagtgacgatattcattcagatgtgtttacatctctcgtgtatctctattctaggtctgtgcaagtaacaggctgatttctactctggagaatctgtatgagcggaagctcttggcacgttttgtcattgatgaagcgcattgtgtgagtcaggtaagtttctcttgggatatcagtgtgtttataccaccagtagtgctcagagccacagcactgaagaacaacccacagtggctgactgatcactctgctgcttcactggagaataaagtgcatcttatatatcgacccgagagatacaaataacctgaaagcaacattttttttccaattagtggggtcatgattttcgtcaagattacaaaaggatgaatatgcttcgccagaagtttccttctgttccagtgatggccctcacggccacagcgaaccccagggtccagaaggacatcctcactcagctgaagatcctcagacctcaggtgtaagtcggtgaaggttgtgggttccattttctgattctgtacattagcatcacctgtagggctttatcaagccaagtgtccagatgtgcccaaggacagctaaatcagaatatttgaaattggaagaattttttttttttttaattctcagtgcagtaaaatttgggaacaaaatctgggtttttttctttacttaataaaagaacaactctagagcactctagacggcagcacacataaaggcgcctgcagccagggctgaccgcctgaggtcagcccctggtatctttgagagagagagaactggcaccttctgcctgttgcccaagcaagccctgataaacaagcaaataaatagaaacaaaaggaaaatcatcccaccctctgctttagaagtgagataaatcaaattcggtcctgggtaaccctgttgtaatccttttaacagattacattttgcgtatcttactttggcttccacactccacgtgccttcatggaatgagcaggtaaccctgctttctcatcttaaagtctctagtccatgcacgatttgagagcagtctagaaccctcttagcacagcactttcacttgaatttcatctcagcacgtgcatcttgctacctccaaatccataactaattggtaacaaaggcactaaaaatatttgcctatatacatttaggtggtgctaggctgttgtacctccacctgagtttgtccatgctttctgtgttgttaatttgctcagcagatacttaacatgtttgtacagtgagtttttttctgaggttcagggagattgcctaagggagtaaaggctgaacagaatattgaggtgaatttgtataaatttaatgacttatttttattttatgtatatgagtgtttatctgggcaccacatgtgtccctgggacccacaaaagcccgaagacatcggatccctgttgatctgacttttatataccattaatgaccatacttgaatgcaagaattattgagttttcagaatttttttgtgtataatcacaaatttggaatggaatgttttaatttaatgccacttgtagtgaggaatatttatgtaaatttggggtgagagaatacattttgttctcatattatgtgcgctaatactatatttaagattaatgttatactttaggttctaataaatactgaatgctagaaatttgtttctagaaatgctatgcttcctataaaatgttgtatttcgattcttctatctgcacccctcatggtttttattgagatggggtacagagtcttagagtcttgctatgaagccccagttggcttgaacttagaatttagactaggctgtccttgaactcttggcaatctgcctgcctcatcttcccaaattgctgtgattacagataaatcccaccatgccggattctgtatattctctctgtctactgtgtgtgtgtgtgtgtgtgtgtgtgtgtgtgtgtgtgtgtgtgtgtgttcatgtaggtacttaggtttgtacctgcatgactttgaaagccagaaatcaacctgtcaacctcaggaattgttccttaggagacagccaaccttggttggtttttggaggcaggatttcattgttgtggatggagttcaccatgttgactaaactggctggccagaaagatccaggcatccacctgtttctacaatccagtgctgggattacacgtggtaagcaaatgctgtaccactgagctatctgtcagttagttatattaattggcaaaagcccaccgttaaaagaaattgtgtaaattcccttacatatgaatgatgtttttgaaaatataggacttatgttttatgtttgaatgaacagtgcacatatttatctagagacagacaccttgaatatcttttcctggaactgtgggaaagtgatgtttcagagaaagcaaaattatacatatccggatgctagctagcacatggcgccttgtgcatatctgatactcataagaatggataagtgaaacatatggaaggatttggtaaatgtgtataaaatgtaagtctgctgattctttaatatatttactatttctgctttagaaagttataaatcccttagtagaagtagattttaagaagcacttcctggtagtttcctgatctttttctgctagtagtcccttacttgaattaatctgccagctgttgctgtgttgtggtgttattggagtcaggtgctcgtagctttagagcggtggctccattctcctctcctagagctctatgataatattcctcctcttaagccggcaaagataaagtctacttgggaagtacaagagtgactaaaaacacaagatttcatgctgttcttttaggaccctagcagatgagctaggtgagcgcaaagagtcaagcacacaggtttaaccgttgtacagctccagaagagctaacacccctctctctcccccgtgtgcccgctgctgcgcctggcactttatattacatttattatattacattatattacatttattatattacattttatgcattcagcctcacaaaagccttaacatgatgtataatcctccatttcctcactctctagataaagaaactgagtcacagcacacatgatggcaaatgcctgagatcccagcacttggtttttacttgtgtttctgagacagggtcttactgtgtagccctgtttagcctggagttcactgtatagactggatcgtcctctacctcagagagctccactgttcctgcctcctgggcactgagataaaggcatttgctaccacacccaacattgcaaaggcaggaaggtcagatgttcaaggccatccctactgcaagcaagttagaaagcagcccgcagtgtagtagtagtagtagtagtagtgttgtgttcgggagacatggctcactggttaagagcactggccacccctccagaggatctgggtgtgattgccagcactcacatggtagctaacaagcatctgtaactctagttttaagagatctaatgccctctggctttagaggacactatatgtgtatggtgcatagctatatatgtaggtaaaacacacacttacacataaaaatataaaaataaaatttaaaagactgacaagatggctcagtgggtaaaggtgccatcaaccctgataatctggtctcagtacccaagaccctcatggtggagtgagccagctccctcaggctgtcctcggatctctccatgcctgccatagcacaccagtccatgcttatgcacaatatccagtaagtacataaggataatttaaattttttttttaaaaggtaaaagaaatagtcacagaaaattaagtagcttgcaaagttcataaccctagcaaatataggagtgagggttttgagcccagcaatctggttgcagaaccttaaatactgctctgaaatgcaaaacagaagtcaccactaaagataattgcagactaggatggccagaaagtcagcatcctaacagagtgtagcagctaacagcatggagaggtcaggtgattttaaaaggacgcagagctcataggaggagcagcttggtagacagtttctgtggctaggctgggatttgcctttcataccacaaaactcccctattgagattgcaggattcagtgcagtgtttggtttttcatggagttatacaatcatcaccgctgtctttttaggacatcttgtctctcttgagggatctgttctccgtaccagctaatctcttttcccctctgctccagacaactattcattgactttctggcttcacagatttttgctattctggacatttcacatacaggttaattatccccagtgtttgcaaccagaagtgttttagatttgaggttcttctagattttggaatgttttcataaacataatgagttttttagggatttgacttagggctaattaaacatgaaattcgtttgtttcatatatacctcatacatacggttggaaggtatttttaacttttttgtttcatttatttaaaatatttcggggggggggagggtggctcagcagtaaagagcactgactattcttccagaggtcctaagttcaattcccagcaaccacttggtgactcacaaccatctgtaatgggatctgatgccctcttcgggtgtgtctgaagagagtgacagtgtactcacatatatacaataaatctttttaaaattattatcactatgtgtttatttaagagcatgaatgttctgtgtgtggaagccagaaagtagaaagtggaggtagaaaatggttttctgctttgtaagtccctgggattgacttcaggttgtcaggctgagtgcaaacacctgtggctgcagatgcatctggtagctttcacttactcattttgagactgttactgtatagcccaggttggcctagagctcactaggtagcctagtctttactcagatttcctggcatgcagaatactaggagttcagacatccaccatcccacccagctcaggaaggcagttttattttatttttatcttctttttcttgttttatttcgtttttgagctgggtctcatgcatgtcagactcatgtcagcctcacattctgagtagcagatgatgaccttaaactcctgctcctgtttttacctccccagttctgagatcagagacaagtcatcctatcctcctggtgtggggatcctgcccagggctttgtgcattttgggcaggcactacaccatctgagctccagctcctttccaggaggtaaattcaaacagggtttttgaatgtctgtgctcttactgccacatgtctgtcaggcaaggtcaggtgtggatttcctagtcacgtgaataatatgcttttctcccatgatccagatctttagatttatcactccggtacccaacagcaacacaaaatgtcttttgtaaacagaaatatttaaaaaaatttttttagatttgtttattttatatgtatgagtgttttgtctatgtgtatatatctgtgctgtgttcgtgcctcgtatctgtggaagtcagaagtgggcatcagatccccaggtgctggagttacagatgattgtaagccaccgtaccatgtaagtgctgggacagaaactgggaccactacaagaacttttaactgctgagccacctctttagccccctgaaacaacatcattttaaaactattatgtatccctttaatgtttatgcagtagaacataaatactataaatatattttatgctcactacatgaaattcacaaattacattgtaaaagtataatttggagctggagaggtggctcagtggttacaagtgcttgctgcttttctaaagaaccctagtttatttcctaatacccactttgggaagttcacagctgcatctatccagctctcggtctcatggtactttctgaccttgatgtgcccacacacaaataaataaataaatacattttaaaatgtttatcacttaggctgcaaatatttcagtatctggtgtgagcctagaatacatttaaatcctggctaagttttctggcactgaaaaaaaaatggagggagaagaaaagtgttttaagtcttacaaaatttatatacagagaatttttatttattttgagagggggtttctccttgtagccctggctatctggacctcacttatatagaccaggctggcttcaacctctcgaagatccacctgcctctgcctcctgagtgctgggattaaaggcgtgtgccaccatacacagccatgaattttatagatttttatatgtgaaatattttgcttattattatatttacctataagtaaatggtgtaaacaaataaaagttggtttttaaatctcctataccaaaattttggtccagattgaattactaaaattattagttaggggctagggagacactcaaaggcacttgctaccaagcctaatgacctgagtttgatccccagagccaaaatgttggaggaagagaactgactcccacaagttgtcctctgacctctacacatgcactgtggcatgctgcattaatgcacgcgcacacacacacacacacacacacatgcacacgtaagtagatgttcaaaataagtaaattaaatcattagtcatcattactgtaggagtttcatacatgtctatgttactttctttaaagtgcatgcttcctttagtatagctaaacagagtcttactttatgtatgtgagtacactgtagctgtcttcagacacatcaggagagggcatcagatcccattacagagggttgtgagccaccatgtggttgctggaaattgaactcaggacctggaagagcaagcagtgctctttacctctgagccatctctccagccccaaacagagtcttactatggtaccaagactagtctcgagtgcatgggctcaagctgtcttcccacctcagcttctccataactgagcttcaggaacacaccaccacatacatcttaaagacgtttcaaaggtaattttaggcacaagctttttactgaggtatctgtttacgagataagaatttttgctttgctctgtgatatcggtggcacaggcctagaatcccagcactcaggaagcaggtggagatcagtctgatctacagactaagttccaggatagccagagctacacagaaaaactctgtcttgaaaaacaaaccaaaaataatttttgtttacagttcatatatctacagatgaattgactcagtccatacattttacttttatggatgtaagcctgagaaatgttactgacataatcatgtagatggtaataagaaactttttattacagcagtaacactcaattatttgaattctttatgaagcatatgccaaaattacatcatgatctgtcatcaaaaattatttttaatgatctgtcaactgacatctcagttaggtactctaaattttgtgggaggtaaaaaattggaaagtatttgactaacaaatctgactaacgaacaatattactatttagtcgtttttctgaaccatatgctgttaaaaatttttactaggtttatccaataaatatgaagtattcttttttacttttgcaagaggaacctctacagtgtacctggtacatttgaaatatcctgacaatacattgtttaccttcctaaaagcaattgcttttatacaggttcttgctatgtgctctggctttcctggaccccactatgtataccaggctagccttgaatttagagggctccacctgctctttctcctgagcttgtgtcttcctgagcaccaacacacctgccttggtttgttgctgttgttgttgttgttgttgttgttgttgttgcttgaggcttgtagcctagggtagcctcaaattcgatatataactaaggctgcctttgagctcctgattcccctgtctctgtttccctcgtacttggaattacaggcatgtatcaatgtggcctggtaaattttccatttaaaggcaacatttaatactcctatatttagctgggtggtggtggtgcacgcctttaattccagcacttgggaggcagaggcaggtggatttctgagttcgaggccagcctggtctacaaagtgagctccaggacagccagagctataaagagaaaccctgtctcgaaaaacaaaaataaaaaaaatactcctatatttagttagaagccagtgaaatctaatttgggttgtttgtttttttgtttgtttgttttaagtacttgttgagataattcgtgtaccttaaaactcagctattcataaggtacagttgggtgtggtttttacattttatcagaacttcctccctgttttcctcttggttccttcactaagcatgtttgcaagagtcatctaggttatattataatatgtgtgtgcatatgtgtctatctgtctgtctttctgtctgtgatggtttgatgggtatcatggtctaaccagtgctaagtaaggactttaccactgagctggacgcacaacctttattctccatttttatggttgaataatattcatttgtatagctgtcccaaattatcttttcttcccttcttcttcctcctctcccttctcctcctcctccttcctcctcttcttcttcctcttcctccccttctcttccttctcctcctcctcctcttcttcctccatttcttcctcctcctcttcctccccttctgctcctcccccttctcttcctcctcctcctcctccttcttccttttttggtaggcactgtgtcttgcttggtatctggtgatccctaacaccctgttttccaacaggcattggaggacgtgttaaaagcagtaaactctggtggtctgtctactttcccaccataacaaactgtgaatgttgctccattagtgcctcagatcttctgtggtagaatgagttctttgttttagttttaattggatttgtgatctgcaagtttctgttcaaagctcatattttattctttttagtaaaggtttatttgaccaaattaaatcgtaaatagttctattttcccaattaagtcacaaatcaaacaaatttcagattatgttccagatgtttttaatatgagctttgctgaatacatccacatcatccaactcacagtgttaacatgtgacacagtagtttacagtgttagacgtcgcacaccatcaccatagtctgagaacttagccaccctctaaaactttacctgttctcgctggtgtccttcccctttcctctcctcagcccaccagacaattttctgtgcataagtttgcccacactgggtgtctcatataaacattcattctatgtgtgtatgactccttcttatctcgtgtgtgtgtgtgtgtgtgtgtgtgtgtgtgtgtctactctagggcaagcacgtggaagtcagaaaacaactggatctacatgtggatcctgggaccaaatttaggtcattattagacttggcagcaaatgcttttacccactaagccatctcactgttctccttactacttggtagcaaaatattttcaagatttaatgctggaaaaaaatattccattgtgtagttttagttccttctttaactatcacctactattacgatcatttccattttgttggctgttacaaagaatgctcttataggtatttccatttctctttggtgtattgctagcagttggatcatcaggtcatgtgatagctcttcttcaccttaaaaaggttcatttatttttacttatacttatggggtgtttgtgtgccagcctgtttgtatgtgaagcacatgcattccggtgcttgtgaagtgagaagagggagttgcaggcagatgtaagctgtctgttgtaggatttttgctggagcttacatactcttaaccagccctgcttcaccctttaaagaattatcaggctgtcttccaaagagtctgcactgttttatgttcctagaatctatctgtgagggttatgactccctcaaatatatcccagtgtttgtttttgatctaaagcatttgtcattttaaatgaataaactctttaaaattaacatgtagttgacaagaagggtgaccctttagatcacaattaatctggactcccaaggtctctcaaacattggaccaccaaacagacagcatacaccagctgatatgaggcccccaacaaatatagagtagaggactgctgggtcagtgttcactcagagatgatgcatctaaccctcaagagactggaggccccagggagtttagaggttaggtggggtggagggtggggaggaagggatgggatgtggaacagtcaagggggggaataaaaaataggagtgtaaaaaattaaattaattaattaatttttaaaaaatgaaaaaaattaacatgtagtttaaagtgggaagtgggtaggcataaagccattcctacacacagtccttacagcattcctatcagcaggaagctcacagaattctgcagatttcttcatcatttatattgctaagcagttgttttagatagggtctcactagttaaccttgtctagctctgaaatccatatcttcttatctggtgggaaatgatattaaataatagtatcacaagaatcagagtcctgcatcctgtggcagtttcatctgaagtcagaacccccaaggctggaattctctgttcccagcaacactctttactgttaacaaaaataggtaaaacgactaaacacaggtagtcctgccaagggtttctggtgctgtgattgaagaaaattcacttatacccatgctataatttactttgttttgtttgctatcctggaacagtctgtggtgataacattcagaagggtggaaggtaagatttcattgtttatattagaaaggacaaggaggcatatgaagaggaaaatgcgaaaggcctgacctgcacatatgccatgagtgccccccattaataaagaaataattttaagctataggaaagaaagcgtaacagcagatatttggtagggtagtggcagaaacagaagagagtggtgaggagtaaaatgggatgtgtgactagttggtgtgagagcagagctggatgttctgagaagcctaccacagagggaaagagggaaaggagagaatatggcgccaggagaagccactaaagtgcctatggattgtagttctgtaagatcctgacacagaaggaaggaattcacagaagagtctataaggaaggcagaaggccatatagagaatgaactaaggaaacatgaagaattaatgggtgccaagagcagtcacccagaggagaaggacgcttgtgtcagagtcaccgcattccctttgcagcccagagcaaaagtacaggacccatgatctctccttttatttatttctgccatgtgtgtactgcccccttatctttttaaatatttaagttacatttatttattgtataattttctttaattgtttaaatcttttagccatgtttgtttttgtttgtgtttttgagacagagtctaactatattgccatttcttctgtgtgtgtgtgtgtgtgtgtgtttgtgtgtatgtgtgatatgctggtgtgtgcttatgccaggcgtaaacatctggtgtctttctctctcagttataattgagacagggtgtcttgaacttggagcttacccgttaggctagactatatgctaatcacctggctggccagatgagtccctaagatcctcatgtgttcacctgccgtgtcactggagcatgttgctgtacagagctcttggcatgggtggtagggatccaaattcaggccctcctgattatacagcaagcattttacccaccaagcgcccacctctgcttcttgtccacatcgcctctaagaccgtgctcttgcctggcctcgttgttttgttttaaacctacagtccagatctctgtcatctagtctgtagacattcctcttcatcaccgttggtttgtttgtttgtttgtttttgtttgtttgtttgtttgtttgtttgtttgggtttggggaggtcagtgttgggttttttttccagacagggtttctctgtgtagccctggctgtcctggaacttactctatagaccaagctggccttgaactcagagattctcctgcctctgcctcccaagtgctggatcaaaggcgtgcgccaccaccacctggcccatcaccgtttttttaaatctttaattcttaatgtaatgtccatttcagtatttcaatatgtcatctgccagggataatggtcaacataagacagcttattaatgaagtttgcatggtggaaaaaaaatcagtatttaatatttgaagatgctaccttcacttgagctgctgtaacagtatcatagactggatgactcaggcaaaagtttatttcttgtggccctggattctgaaaaaaaaaaaaaaaaaagatcaaaattccaattcatcctttgtctggtggggttcctctccctgttttatacttggtggtattcacattggagccatatgtactagggagggaagggtcagtgaggtctctgtttggatagttttatttttgatttttgatttttttctttaatattatttaattatgtctttgtatgcatacatccttgtatatgtgtgggtacccgtgaaggccagaagagaatgttgacttttttggagctagggttacaggtatctctgagatgtctaatgtgggtgttggatttcaattgccagtcctctgatagagcagtaacagccgactgtctctccagctcctccgtttttataaggaccctgacctccttagtgactctacctccccacctagttaccccccccccccgggccccacctcctaatgccatatcattggggcaagcattttgggtgaaaacattcagttgatgataatggatacaactgtattttctcatagtaattaaattttgtgtttggatcttcttttaggtttagcatgagctttaacagacacaatctgaagtactatgtattacccaagaagcccaaaaaagtagcatttgattgcctagagtggatcagaaagcatcacccttgtgagtacagttgtgtaattaattatgtttaaaagtaatagattttaaaagtcttttctgtattcactgtactacaatagaatatgtgaaattgcatgttaacattttctttttgcattatgatagtaccaacttgctaattgtagggaatattataattttgaaatctcattttgttagataacaataaatcctagcaaatatattaagtatacctcctacacgcttacattctcattcttggtgtcggtgtctttttctctggtgtatctcagtgtacgaataacacagccctgctttagtgacttctcccaagtgtgtttgcctttgccttatggtagctaaaatgagtctctgacattcgtaactgctttcatgtgacccatcttcaacgtcttcattgttttctcatggcttttgtaaatgtagaaagcaccttttaatagctataatatacttatttcatagttctttatcttaattatcctcgtatgtttgctattgagctccttttgtaccaaaacttgtactactccttgtaccattttatttcttaggttttttttcttggaaggaaactgagtcagagggtttttaccaggctcttgataatttttgccatatgtttctacaacattttttatcaaggtagctccccgttgttgaatcagcgtgagacagcccaggattcagtcctgggcaccctcacaagaacaggattacaaatccagtcttattttctgtgttcacaaattccttgcttgagctgttgtgtgatcatcctgtatcataaggatgctgtaaaggtctctttagggaccgtgtatctctaggaacatgtggaaatgtgttaatatttaagtgaaaaggcatgattcctcactactactctttgggcttcttggcagatgactcggggataatttactgcctctccaggagggaatgtgacacaatggctgacactttacagagagaaggcctggctgccctggcttaccatgcgggcctcagtgactctgccagagatgaggtgcagcacaagtggatcaaccaggacaactgccaggtgacgctcgcagaagtttgcagacctttcatgttatcagcagtctcgctgtatataatacaggctttgtttgaaatagggtcttgctatgtaattgaaaccagggctaccctcctgcttccacttcttacctggctttgctgnnnnnnnnnnnnnnnnnnnnggagggagagggaaactgggtggtggtggtgcacgcctttaatcccagcactcgggaggcagggcaaggcggctttttgagttcgaggccagccaggactacacagagaaaccatgtctcaaaaaaaaaacaaaaagaaaaagaaaaactaaaaaaaaaaaaaaaaaaaaagagggagagggaaaatgtgtgcacaccagggactatggcatgcacatgcatgtgttgtcaaaggacaacttgcaagagactgttttttcctcccaccatgtgggtctcaggtatgaaatgtatgtctcaggcttggcagctctctgagcttgttttatctgaatggtcataaacatccaagtaagctggtagtgaatccatgaggcagcgaataacttgagcatgttactcattcttaaggagacgacaggtgaagggagggctaaaatgttatttttagtaacagggaatggggattattatcctaagagtaataattgcatccaaggaagacttcagcagaatagtagacacagatgaaatagtcaaatgtattctacattaattcatgagatacctgtgccaaacacagaacagtcttcagaatcagaagggggaagactggacctgaaaagtgtcccagccattcattgtcattgtgttgaaaataacaaaggcagaaccccgtgtggtggccaattcctgcagtccccacactcaggtggctaagacaggaagttttcaagagttccaggccagcctaggctatcatgcgagactctacattaaaagaaaaaaaaggggctggagagatggttcaatggttaagagcactgactgctcttcctaaggtcctgagttcaaatcctagcaaccacatggtggctcacaaccatccgtaatgagatctgtcgtcctcttctggtacatctgaagacagctacagtgtacttagatataatagtaaataaatctttttttaaaaaaaagaaatctgtccttttacttcagttaaaataaaccaaaaaaactactttatttgattttttttttctttttttttttttggtttttttggttttttgttttttcgagacagggtttctctgtgtagccctggctgtcctcgaactcactttgtagaccagactacaaccgcctccctctgccttctgagtgctgggattaaaggcacgcgccaccacgtccagctgtaaggacagatttcaatttgtatatttaatcaaaattccaatatttttctttgaagaacttttataaaatttttctagatgaatattcaagtgaagttatgagtttggcaataaaatcaataacatgactgggtggaggtggtggtgacatgcacctctaatccaagcactttggaggcagaggcaggcagatctctgagttcaaggccagtctggtctacagaatgagttccaggacagccagggttttgaaaaacaaaacaaaaataatagcatgagtactgtttgcagtttattacatgtaaaaacaataaatgataaagtttaatatttatgagaaatggagtttgaaatgtagcttgtgcataggaccctgggttcagtcctcatcaccacctagaactgtacacgccactgtacaaccataacctcctcatcacccctaaagctgtacacgccactatatacaagccactgtacgaccgtaacctccatgctcatcgtcctcagctacatgctggctttgaggctagcctggcctgcatgagacccaatctccggggtgggggtgggggtggggggatgaaggggttgcttaatggttaaaaacatacactgctcttctaaaggacccaagtttggttcccagcacccacataggtactcacagccactgtaactgcagcacgaggagatcttataccggagttccagcatactgtgggcacacgtttgcaacacatgcacacaacatgcatttgtctgtctgactgtctgtctgtctgtctgtttgtttgttttgaaacagggtctttctatgtagtcttgactcctagaacttgccatgtagaccagcctagtctggaactcacagagatctgccttcttggcctctcaagttctgggattcaaggcatgtgccaccattgtaatttttagaggtaaaaagttactcaatcatggcattggttacctaatttaaaaagtcatattatgggctggtgagatggtttagtggttaagagcactgattgctcttctggaggttcaaatcccagcaaccacatggtggctcacaaccatccttaatgagaaacaaaaaaatcctatgagccagagcaagtgggaaggggggaaaagggggaaaaatattttacattctattttggttggttttgttagttttttgagtcagggtctcactgtgtagccatggctgtcccagaactcactctgtagaccaggctggcctcaaactcagaaatccatctgcctctgcctcctgagtgctgggattaaaggtctacaccaccactgccaaactcaatttagattcttataccaaaataaaatatacaggactggagagatggctcagtgggtaaaggagcttattccctaaagtaaccaactgagctggaccaaggacccacatggtggagggacggcatcaattcccacaagttacacttggacctcatacatgtagtgtgtgtggtacatgcacatatatgcacacacacacacacacacacacacatatacactaaataggtgtggtaaaatagagctaggtacaatatagagctaggtctagtggtatatgattataagccaggaaacgtgccatgagttccagaccagcctgatgtgtagtaaatacctgaccaatcaagggcctggaaatatgtttccatggttaaactactcactgttcaagcataaagattggagttcagatctctagaaccttatcaatggcccacctctaattatagagctggaaggtggacctgggctcacaggacaagaggtctaatcagattaactctatggatatattctgggaccctgcctcagcaaagaaggtaaagactgacaacaaagactgtacacgcacagagagggagaaaataacagccatgcatgggtgtgcatgcccatagcagcactgggagtagagacaggtagattcccagagttcactggccatccagcctagccagcttcctgatgagcaaaagacagtgtctcaagccaggaaatcaaagagtagtagaaaaagccccattgttcttctctggtctctgtatgcacaaacatgggcacccagacctacatactcacgtgcaggcactacacatgtatagcacacagggacatagacatgtgcactcatgggcatgcaccacatacatacaatacacacaatacaacgtcatctgcatacacacaatacattttattttaaatagaggttaagtgaaaagtactgattgtgattgatgttttattatttatacactcttgagcagtggaaaaactaagcttaaaaaaatacccaaaaagaaaagaattgctgacaatgtctcagaagctaagcatgtgcacatgggtaaatagatggtgaacagcagcccagattgtatcttcagcatacaaaatgggccatatgagactttttttggagatatatatatacacacacacacacacacacacacacacacacacacacgtatacatatatacacatacatatatatatatgtatgaactaggtgtagtaggcacatcttttaatctctgctcttctgtgagtttaagggccgtctggtctgcatagcaagttctaggacagccaggactacagagatagagaccctgtctcaataaaacaatttaaagtaaattaaaaaaagcaacacagaaataaagatgttagaattcacgaaatccgttttcctctagttatttaagtgttgataagtgagcatggtagcttgtgcctgtggtcccctcacttgggaagctgaggccagacgctcgtgagtttgaaaccaaactgggccgtatgagagcctgtgataaatacaaacaaaaggaagaactttcagaaatgattgggatagcctgtaccatgtgcctcacagccatgaacttacttaagtaacactggggctgagcttgcctgtgtgactctagagctactgtgggccagcatctctcttttccgcagcctttgccagctctctagcattagtctgcagtgcgctttcttttacatggaatactccccccccccttttttttcaatttaatacattggtgctttgactatacacataactatgtgaggatgtcagattgcttggaacaggagttagagagttgtaagctggcatgtgggtgctggaactgaacctatgtcctctgggagagcagcctgtgctcttaactgccaagctgtctctgcagcaagccagtcagtgcctcctgtgctgatggtatgctgatctgctgaccctgggtctcttttactcctagtggcaaaattgtgtcatttaatgtgactgaccactagatatttctttcatctttgtaatgctatttttgcaatagcaagttatgttttaagtgcttaaaaagtcaactttatttgtataatgtaattttgcctgaatatacagtattttggccttgatcaaattaagtcctagattttcaactgaaatactcttattttttttttattgtgtatttggggatgggggaaatctgcatgtgaatgcaggtgccctcagtctgaagacatgttggattttcccccaggactagagttacaggcagttgtagagctgcttacaaagcccagctcattttgtttttaatcttacatatgtgttttcgggtacccacagaagcaggaagaggtcattgcgtcacctggagtttataggcaattgtgagctgctcaccttggttctggaaactttgcttgggttctctacaagagcagtttaccctcttaacaactgctccatctcttcaggccttaaaatagatactcttgaaacaaatttgtcaagctcctaaagattgactgttgcctagctcccaccgaatgattctaattcatatggaccgagaagaacagtccttggcctttctgtttgttctgttttgttctttttttttttttttttttagatttatttatttatttatttatttatttacttatttaatgtaagtacactgtagctgtcttcagatactccagaagagggcatcagatttcattacggatggttgtgagccaccatgtggttgctgggatttgaactcgggaccttcggaagagcagtcggcactcttaaccactgagccatctcaccagcccctctgttttgttcttatggtttttgtcattttgttttctttctgtataagcaactcaggcttatctacagttaaaattgcataagtttttactttgaaatcagtggttgaataacatgagttagcatacgatcactcggttgcatcttgaagattgatggtaaatactagagcagataatatcgttgtttctgagcctgggaagaaccagcagcaattaccttagggctagagaccaccctggagcccaggctattgcttacgcaccttaacatgaatgccatggctctgtaaacaaccccaccacacatgcctgtcagggacaatcagcacagaaaggtctgcttgcagttgatgcagaatccttctgatggcgataccaagtccacagaaagatcctgccaccctgagcaggatcctctacctccttggatctgaatagaatcataggttaccaatatgaaaatctcaccttggtcatgctaagtactgttgtacacagttcttttaaattgttagttaatgcattatgagtctaataggcttctattttcatatcaggttatctgtgcgacaattgcgtttggaatgggaattgacaaacctgacgtgcgatttgtgattcatgcatctcttcctaaatctatggagggttattatcaagaatccggccgagctggaagagatggggaaatatctcactgcgtgcttttctatacatatcatgatgtgaccagactgaagagacttataatgagtaagccacataccacatcctgtctgtcatggtccatctcatgagtacagtctgcccctgctgttgtagtacttgggtcctattctcattagtcatagaaaaatgaaggcatttaatatatattgtaaagtttatttaggtttattataaagatatacattcttgtttagtgaagtcatgtgatgctgacatgtacaaagtgtgttccagactaggcaggctaaccctccagatcgtgggttcctctatacccttccagacccagtcttacgcacccttacatattacaccccttccagggaaataatgaactcttgaagaactataagaaccatccaggttagtggagagttggggagagccaggaatagaggtgtatgactgagtctcgcttgcttgaacctaggaattgaactgaatgaggctggcccaggcaacaaaatgaaaccctgtctcagaaaaaatgagaggatagtgagaaccagtcttagaggaaggaggaaaggaaaaaggacaggacgggcaataaagccaaattcccctgtgaatccatcttctactttacccttttccattagaggcaggcagcaccttgtgttcagtgttcgcctttcccaagtgcaagtgtcttagaatgtaaatgggtggtctgtgagatgtctcagtggttagatgcttgtcaccaagcctgataacctgagctcagtacccccaagagatgttttctgtccacacatatatgagctagcatatgtacatacatgcatatattggtgtgcatttgtgcacataagtaaaatgtaaatgtaattatgttatagaatcctaagctttttactgacttcacggtcatcaccgtgtgtcatcacagccttgtacagatgcctttcagcgtgggtatacttaaatatgtcaccttaatgtcaactggcttaggaggctgattttatcatgtgtgctctcttcctttttttttttttttttttttttttggtttttcgagacagggtttctctttatagccctggctgtcctggaactcactttgtagaccaggctggcctcgaactcagaaatccgcctgcctctacctccccagtgctgggattaaaggcgtgcgccaccacgcccggtgcgtgtgctcccttaaatatgttttgtaatcctatgtttttgagactctggtctcctttatgctggcacaggtactgatcatgggaaatggcactagccacagtaactcctgtgaaaaagtgagctacaaagagattttgtaacttgccctagggaacgtgaaggaccatttatgggaggaacagcctgatgcactggcatcattggtgcagtgtgggtcatcctcacttcccatgttagggcagttttttcagttgggttggttgttttgtttttgttttttaaaacaaggttgctagtttcttattgttgtttgttgggctttttgtttgtttagttggttttcttttgagatacagtctcacttggtatagcccaggttggccttgaacttgtgatcccctgcctcagtcttaagtgctggtactgcagcagtgaaccaccaagccacctcttgctgtcttaaatgctttactacctgtcagctcattttatctttaccacagttctaaatgatgagacaattgcttaccttattgtcaaggagaggatgagctggagaagtggtgaggcgcaggtccctaatctccaagttcatctaactgtaaagcctgagcgtgatctttactgcaccaaggatactcagcacaaagcaatgagttgttcatatgtggatggctggtttgtgttcttaaacagaacctggacaagcagccttccatgtatggtgccttgattgatttcagctttatgatagcttaatttgttcaattaagccatactttaaattttaaatttggtagggggaggcttgggaggaaggctctaattttttttttttaacatttatttatttatttatttaatgtacttgagtgccctgttgcttacttcagacacaccagaagagggcgtcagatcccattacagatggttgtgagccaccatgtggttgctgggaattgaactcatagcctctggaagagcagctagtggtcttaaccgctgagccatctcttcaaccccatctaaaatttattttatatgtatatgtaaatgcccgaatgtacatgtcaaccacatgtgtgcctggtgcctgtgaaaactagaagagggcatcagattccttgatagctgaatatggtctgccatgtgggccctgagaaccaaacctatatcctctacatgaacagcaagtgctttcaaccactgagctatctctccacccctatacttttatgagctagtgaaatacagtttgattttatcttgtgatgtgtggtgctggcagcctcaacttgcagtcagccgtacaatcgccagggtcagtgaccagcagtttacacctgctatgttacccagcatcttcagggacattaagtgcatgacccatgtatattttcaactcaaaacaggcttgtcaaaaatatggtcttttgccaggcagtgttggctcatgcctttaatcccagcacttgggaggcagaggcaggcgaacttctgagttccaggacagcctggtctacaaagtgagttccaggacagccagggctacacagagaaaccctgtttcaaaaaaccaaaaataaataaataaataatggtctttcataactcttaaaaaaatttgtgttattaagtctaagtattcaaatcacgataacctagcaaccatttgaaaaaataatactcagaaaatggaagtacaatagtaatttgattctttaataataatgattgcctattaatggaaagtatacaccagtggtttttattgcattttaatttatttcctgtgtgtacatgcacaggtgcatgccacagtgcatgtgtcgtggtcagagaacaacttacgtgagttggttctcgccttttaccgtataggttccaagaattaagcccaggtcatcgggcatagcagaaagcacctaccctgctcagcgcctcaccagcctcatttcttgatcttaaacttcggactcaaatagcttatgtgcactcctagcttctgttttgtgtaagcaaatgtgggggttggtagggatcaaaccagggccttgcatgtacatgctaggcaagctttgttccactgaacgacatccccaggccttggggcttttgttgggtggttgtggtagttgtttgagactagctctcaattattaagccctggctggcctagaacgcactgtgtagaccagggcctggccttaaactttcagaaatatacctgcctctgctgcctcagtgctggaattaaaggtgtgtgccaccatgcctggccagtcctgtctgtttgtttgtttgtctgttttgagacagggttctcactatgtaacccaagcttttatcagactcatgatcctcttgcctcattactgggctgggattacagacatgtaccaccagccttgtcatatttgctttacgggactacaccacagcaactttaaagttctaacttcacaagcctgtgactccaacacaaatatattatatttaatatcatgaactacctcaaatgaccagtttggacaatgtgcaacagatgagggcattgctatttcccttaaatctaggacaccctgtctctgagttcccccagaaatcccctggattcttgaccacagtttcagaagtcctagtgcactaggacttcaactatggattctgcctgcttcctctagatatccagctcagcacatctgcttagagagagagaattaactccatcattgggggtaataaaaacgtaaagaaattttcaattaaaaaaaaaataaacattttaggatgaaatagcttatgaaaatcccaatattttggagcctggggcaggaggatttcacaatttcaaggccatcttgtgagactttacctggaagaaaaagaagatgaagaggaggtggaagtacaacattcctataaaattaaacccacgagaggcgaacctgaacatctcgtaacttgcagcataaagatgtcattggcactgcattgctaacagcaatgttcttatttatgaatttactttaaatactggtttcatattcttttggttttctactataaaatttaattttgttctgctcttcatcttttttagtggaaaaagatggaaactatcatacgaaggaaactcacgtcaataatctatatagcatggtacattactgtgaaaacataacggaatgcagaagaatacagcttttagcttactttggtgaaaaaggattcaaccctgatttttgtaagaaatacccagatgtttcttgtgacaattgctgtaaaacaaaggtaattacttaagtggtgatgcaggcctttaatcccagcacttagaaggcagaggaaggtggatctctgagattaaggccagcctggtctacacagtgagttccaagacagccaaggctacattatgaaacccaatctcaaaaaaaaaaaagtaaaatagtaaaataataaataaaggtaggccggcatagtggtgcatgtttgcaacccagtgcttagggggcaggagcaagaaggtcagaaattcaccatggtcttttactctatggtgtgtttcaggccaacctggactacatgaaaccttaattcaaaaagtaacaaaaaataaaaaagtaaaaatccaacatgggcaagcatggtattttaaacttaactatagtctatatttagagatctcagtctcagaacagtagtaatagtagtagtctttttgaaaatcacttgtttaactgtaaaagcagtgagaacaccatgatgatgtcatgccagcagtccagagactgagacaggaggatagagaatgtaaggccaacccgggaccacaaagtgagatcatgtctcaaaataacaacaacatggtgtctggataagcttaatattgtcaggcctaaaataaccttggagactgttaaactcattcattacgtacttaaattatggcaatttctctctcacatacaaacaatctccccagtactggattgatcctaaatcctcaagccatactaggcaagtgaactatatactcacgccccacctctttattttatttttaaaagacgagatctttatagctggcctagttagcttcactgtcaacttggcacagcctctagtcgtctgagaagagagttagttgagggattgattgcccagatcaaattagcctgttatcatgtcccatagctgtagggtttttttattattatcattattattattattatcaatgtatatgggagggcccagcccattgtgggctgcatcattgcctgggcagatgatcctggtctataagaaagctggctgagggtctgaagataaggctcagcagttaagagcactgactgctcttcagaggacctgggtttgattcccagtacccatatggcagctcaccactgtctgtagttgcagctccaagacttctaatgccttcacacaaatacacatgcaggcaaaacagcaatgcatacaaaataaaaaataataaacatttaaaaagaaagagagagagagaaacagagaaacaaagaaagctagctagctagctacatataagctagcaagcagtgttcctccattgtttctgcttccagttcttgccctgacttccctcagtgatagaaatacctgtaaactggaataaatcctgttccccactaagttgcctttggtcagaatgttttatcacagcaacagaaatcaacctaaaatagtagcccagtctgtcctagaaatcagagtgtagcccaggcagagtgtggcccaggtagagtgtagcccaggcagagtgtggcctcaaatccacaggggtccttctgcttcagacgcccaagtattgatgctacaggcactgagccactacacctggcttacagtttcaagtcttaatatttatggtgcctcactgtttatagacttttgcacacttgctatgttatttaaactaactttagtgtgctagaaatacccagtgaagggaggcagacatgtaatacagcatactatgaagtgttacagaaatatatagagctaggcagagcagagagtgatttactctgtggaatctgtacagccattgccattatacctgctcaccctagaaatgctgctatccgttcacttatttgccacgcagttgctctgtggcaggctctgttgtaggagtttagggtacatgcaatatggacaattagggtaggtgaaggcagaagcatcatctagtaaggaggacagacactgaggaaatgcaaagaggaactaaaaggaaaagtcatggtggcagcccatgtagttaacccagtactcagagatagatctgtgagataaaactagcctggcctacacagcagggaaattacagtagcaccaaggactgaggagagacagagaatctgtgacctgcacagatggtagtgtctgtcttcctaaagactcatctcacaagggacagagtactgctcctggagctgtgaaggggaggaacttaagttcttctatgtacagtgctggtaggtcgttgaaagacacgatacatgtctgaagcaacagaaatatggctactgtagagtcctaattgtattctattctagaatgtaagagtgtgagcatttaacactcaagaggcacaggcaagtggatctctgtgagttccaggccagactgctctgcatattaagttccaagataaaactaggattattgcacagagagatcctgtctcagaaagaaagagagggggggagggagggagagaaacagagagagagacagagagagagaagaaaaaataacaaatatttgaaactgccttagttttttttagcgtggaaacgaattctaagttttaccataccattaagctccagtgacctgggtctagttatcttagttatagcagaaagtaatttttttattcataggattataaaacaaaagatgtgactgatgacgtgaaaaatattataagatttgttcaagaacacagttcatcaccaggaacaagaaatataggacctgctggaagatttactctgaacatgctggtcgacattttcttgggtaagttatttactgtgttgtttgaattatatcacttcaaattaaacatatagggctagagagatggctcagaggttaagagcactgactgctctttcagaggtcttgagttcaaatcccagcaaccacatggtggcttacaacaatctgtaacaggatctgataccctcttcttgtgtgtctgacagctacagtgtattcacatacataatataaataaataaaaaaattttaaaataataaacatctaaggaagtggttataagtgcatttaaaaagtcactaaggtgactttttacattaacaaataatgatgatgataggactggcaagacagtgaaaggcctgagtctgatcctagaacgtacataaagaaatccagacggcctgccagcacatggctttaatcccagcactcaggaggcagaggcaggcagatctctaagttcaaggccagcttggtctacagagcaggttccaggtcagccagggctacacagagaaacccaaagaatttaaggaaggaaggaggaggaaaagaagtagaggaagaggagaagttcagacatgggctgggggtggctcagtggataatgtgcttgctactacagtaagcatggggacctagggtctggatcccagcacccatgtaaaatctgcctataaccctcgtgatgggcagatcccaggagcttgccccctagccagtctagtcaaagtggagagcttcagacagaggcctaactttaacctctcctacacatctacatacactcatgcatgcatacaccacacacacaaagccagatgtgggtaacaaatgcttgaaattgcagagaaaggggcaagacttctacctccacctcctttgagacttgatgagatgctgttttgcttgtggaatttgtatattctttatcagagtgtaattgaacatacagacttaaatatttgcttaatagatacttaaataactaaaaccagagatggtatttagaaggctcagtggtagaggtcttgtgtgtgagatccttgatttagcctcactcagcactggaaaaaattccaaaagtcctcggagggccagcaagacagttcagcaagtaacgatgcctgctgcccggcctgacaacctgagttcagtccctgggtcccatgtggttgagagagagaaccaactactgcaaggttgtcctcacctccacaacgaatgctgtggcacatgtgtgtacccaatgaataaatgggtaaaaaataatttttaaaaattctgtgagatgggtatacacacctgtaactctcagcacttggaaggtggaaatgggaagatcgggagttgaagtaactttcacggcatcctgggctgcccgagaccctgtctcagaaaatataaagcacaagagaatagtataaagctatcagcagttatgtgaattctttattttttttgctagtttttctagtattattttataagctgtgaatgcaacagtttgaaataacaagtttaattttgctgtagtttttggttaacatgtgtagtaagaacaaggaaaagtaggagcaatcagggactggggtagagttcaagcccagtgcacacggtgtggacttctaccccagcactaagagaagacatggcgaccacagagccttggagctctcctcagatatgcttgtaactcagaaatgagggtagggtctgtttgtgctgtggggtttcctgtggaacagatgatctcttgtttgtccacagatgtccttgaatggctttttagcctcctgtctgaatgacgctgagcctgtattactcatctaaccttttgaaccttattagggagcaagagtgcaaaagttaagtctggaatatttggaaaggggactacatattcacgacataatgccgaaagactttttaaaaagctgattctagacaaaatcctggatgaagacttatatatcaatgccaatgaccaaccaattgcctatgtgatgctaggaacaaaagcccacagtgtgctgagtggccacttgaaggtaaggtatttaaacatgcgtcttactgtcgcacagtatctatcataatatatcataacagagtttgttatccttccaaagtcacatttcctctggagcatattaggattttaattagaaagagatcttgaaattgatccaattaatatgctgtttgtcaaaatgaatttaatagatattcaagctactaaatcttcccatattccctgaaaaagcatgtatggtctggcaagtgggtacgggtacttgctactaagcttcagatctgagttaaagctctgggacctacattgaaaaaggagagaacagacacctataaattatcctttacagatacaccatgccgtgtgtatatataaagtgcatgtacacacagaaaagagaaacgaataaataagtaagcatttatcaagaggtgctctcatgcgccaggccctggaaatagaaagagggaatgcacagccttgttctgggaaagaaatgcaagggcaggcagtgcggctccacaggtaaaggcactgccgttcaagcctggcaatcagcattctgaccccagaacccagggagaaggaaagaaccgactccgcaaagctgttctctgacctctacaccttgacacacatacaggcacgctcatgtacacacacaaagtattaataaataggattttttaaagtaaaatttaaaaagtaaattaaaaacaaactgggaaaagctttctgggtacagtgtgcctctgctcactctgctgaatgttttctttatcaccaaggtggacttcatggaaacggaaaattccagcagtattaaaaaacaaaaagctttagtggccaaagtatcccagagagaagaggtagttaagaaatgtcttggagaacttacagaggtctgcaaattgctggggaaagtctttggtgtccattacttcaatatttttaatacagccacactcaaaaagcttgcaggtaggtaggtacctgtaggccttgctcttctgacgcaggttagtggccagttcatctactaaaggatctgtgttttgtctttattgtttctcagacaagatcttttaattaatttgttgttgttgagacatggtttctctatgtcacccttcctggtctctatctcactatgtagaacaagctgaccttgaactcacagaggtctgccttcctttgcccctacctcccaagtgttgggactaaaggcgtgtgccaccatgacatgatgagacaggggcttattatttagttcaggatggctgcaaactaatcctcgagcctcaagctgcctgagtgttgggcttagaagcatgagctaagggactttgtaagtcttggtctattttaaattttggtttaatctctgggttttcaacccagagacacatttaagctctttcttgaggtaaaaatatatacggttcagatatatgctataattttaatttcatgcctttctgtaaagctgaatgctagaatgtgaataattgccttctataaagccagatgtcaagtatttgtgcggtctgccttccgtcctgatgctcagctatttccgtgcaagtgctttgcagtgagaagctaaacaggaaaggaactgctttaggcttctttgactctggatctataacactgctgtgtctttagttaagaaatatttgctgatctgagttatttgcatggactgagataacctagaatgtcggtggtaagatctctggaaagtaagttgccataattgcctctgtgtcccctgctgctgctccttcgtgaacccacatagccatctactctccctgcactcccgcccacgcagtcaccttttgttcaggccttgctttccctgcatcatcacggcagtcccggcctgggtttggtttggggttttggttttgttgtatggcactttcgtactaggaatttaaccctggaccgcacctgtgctgagcactgacttagcagggctaagcttcagccccacctaaccattctgttcaatatcagtgccttctccatgacaccagaagatgtcaacagaatactgcacatctcagggacaaaaatggaatactgttttatcgaacctaaacatcttttttaggtcatcaaaatatctgtcacttgcaagaaaactatgaaataggtcatttctcaaagacaatactttattaatgccaaatttattacctactacttggtctcaccacctgtctacttttnnnnnnnnnnnnnnnnnnnntgtgtctagcctaggagccactgaatgtatgcaagtgaatgtgggtgagtgagtgtgggaatgtgtgtggccaatgtgagatatgatgggtcatagtgtacgagtgtgtgtgagacccagtcgtgtgtgattgtgtgcatgattttccatgtaggggtgttggtatatgagaaaaaggtgtgagagagtattgtgtgaattcacatgtacagaagtgtgagagtgtggttgtgtgagggtgcatgagtgtgtcagagtacatcagtagtaagcgtgatgtgagtgtgtaagattgtgtaagtgtgaatgactgtgtgattttatgtagttctgttgagtgtgcttgttggagagactgcatatatttgagtgtgagaacgtgtgtcactgtgtatgtataaattatgtcactgtgtgtgtgtaagtgtatgagactatgtgtgtatacattgaaaagagtgtgtatgaatgtgtgttgatgtgaatttgtgtgtgaatttgagcatataaaattatctgtatgtcactgtggccgtgtgttggcttttgactgtgtgtgtgtgtgtgtgtgtgatcttatgcacctgtgaaaatttcgtgtgttagtgtgactatgatcacatgtgagcccctgtgtgagtcagagagtctgagagtgggatgtgtgagtctgtatgagtgtgattataagtgtgtgattgtgtttggtggtgtgtgtgcatgtgtgtcaatgtgaatatgtgtatatgaatatgcatgcatttgagggtatttacctgaatatggatatgaatttgtgagtgtgtatgaaggtgagtgtgtgtgtgtacacgtacactctcacacatgtgctagtgtgaatgttgaatgcttgtgtgagagatgtttgtatgtatgagtgtataagtatgtaagcatgtgagtttaagccttaacatgtgtgaatggtgtgtggctgagtgtgagtttgtgtgtgtgcaaatgtttgactgtatgagggtgtgagaatatggttgcatgcctgtgttctgagacagcctcaccatgtaacctaggctggctttgaactcacttgattctgtccccttagtgctaggattcctagagtgaatccccaaacctggtccatttcagcatctcaagacccaggtagggcaactgggtgcaaggctctgggttcagttaccagtcctcaaaactgaccaatgaggaaacatgctgggcaggccaggctgagtcctgcagttggggagccattctggaacacagagtacccacggcccagcccatggccagatgagcttgtccccaagacacaccccgtgtacgtgtggaaaccaaaaccacgatagatgtggctgggcatcttcctagtgaggaggaggctccagcccagcctgcccagcctgaatttcagcgcctgctgacagagcagactacactctctaggcttcagtctccccaacagtcaaaccaggagaaactcatttctgatctttgtgtaccttccctcatggataccggtacaccaaggcacacttttgagcagtaagaaggcacagtctgccacatggaagcatttgtgcgttaaaggggcacaagttttccttgtctctccagtgttccccctccttgctctctacaaccaccctcctcagccttgggctctctattcaacctctcggtctcttgtggttgtcaccatgggtagaaaccctactttgggatgctgatctaggtctagcgagggtccctccagatgcaaatctgaccacccagcatgggcctgatgatctgcatggcatccatctagggctctgccttcctctgggaccaccacgagaattctccatttatcctgcctgagcacgcaggagaccagattggtgtcgggcaggcacattcaacagacgcccaatatagacattcaattatcttttaattttgtttctatcttcatttgtttatttcagtttcatttaaacagagacttttcaaaagaacctgtaatttatggcatgtaggtagcatttgttcacctgcagatgtaatgagacctgggctggagcctaagctagaatcctaatactctgccatggagacactgcctgcccccagggaccccagagcctgcagtctgccttctgcgcttctctgtatgaatcctgacttctgatcttccagctttgcaatggttagcttccccttccccctccatgctctgaccttcctggaaaccccccagagtagacactccccctccacttgaggaccacaaactcccttcccttggctgcattctctgctctggtggcctccctgtaacagaggaaggataaagccacatttcaaacattaacacgcagactcttgagaggtggggacctccgttttagggttcccagaggggtctgtgagcatccgctgtgcccagcagcccacctgactcagctgacatcccctcccttaccggctccagcccatattatccaggtcggctaggagtcagtcctgcagttcttgcccagggcctttggttataagcaagtagtaaggattgggagaggggctgaaagaagagactggagaaggagaagctggtttggaagggcaaggaactcaggaaggcggccatggaaggggcctgtcttagtcagggtttctattcctgcacaaacatcatgaccaagaagtaagttggggaggaaagggtttattcggcttacacttccatgttgctgttcatcaccaaaggaagtcaggactggaactcaagcaggtcaggaagcaggagctgatgcagaggccatggagggatgttccttactggcttgcctcccctggcttgctcagcctgctttcttatagaacccaagactaccagcccagagatggtcccacccacaaggggacctccccccttgatcactaattgagaaaatgccttacagctggatctcatggaggcatttcctcaactgaagctccttcctttctctgtgataactccagcctgtgtcaagttgacacaaaactagccagtacagggcccagggaggtttggagtttgactggacctagacggctggaaagatccccaccggcaaagataaggaggcctggcctgcaggagtcaacaaagtagggcacactagactgccacatgcagaagggtaaactgaggctgttgggtggaggctcacacacataaggacctcctaaggggatcccaggaggccagcaagatgacactccagtcaagcaaggcgacctgagttcaaccctcaggatttgcacggcagaaggagaacagaatccttgggctgtcctctgatgtcacatgtgcctatgtgtatgtacccacacatgcacttgcacacacacacaaatataacaaaaaagtttagagttttcccaaggccagaaccctcagaaccaagttcctgggccttcaaattggatcgttctttcactttgcaacctgaagacaacctttaaaaagtggagcgtgtgtgttgggcatctcggcagctgaggacctgaatcctgggcacagatggaggcttacccagagcaggcctgggcccccactcttgctcagtgactttacctcccttaaaactgtgacctcagcacccacccttgagaaccagtaaaaaacctgcacatgggggagataaaaatagccaagccttgctgagctttagcaacaacatggggcttcatgcatgttgactactctacctgatgagctaattattcggtcaccctctgtctcttgccacttttcaggcaggcacagagaagtaaaggtacttgcccaaggtcacacagctggtgaatggcagatttgagtctggggtccacagtgctgatgtgggttgggggttgtgaggagtcactcctccacaggcctcttttcctatgaggttggctcatcatgaagaggaggcagggtctctaaggtctcattttgtctgggtgctaaggtcttgtatttcctggctgcttcagcaaagctagtttctcttcaacttgttgagtagaggaggagggcagaggcagccaagggcccagtcaggtggcttggccgccagcccaggcccagcgtcctcactgtttcattgcttggctggttaaaagctgacccctcagttagggccaaggccatccccatacgcctgttaactgtggctccacctgctccgggaaccaaggcaaaagctgccccaagcttccaacctaaggatttgcaaaagagaaaataaacaccctcacacacagaccaacagtgtggcttctaggcatctggtgacagttctgctcagagattccttcctctttgaatccctgttggacactccctcccaccaggggctgcaggtgactgatctgaagctcgggcccctccagtcgggaccctccctcctttcaggcaaggatccaaagaggccagctgcaaccttagccatcccctgccccattgccgactcagtggactcaaagtcacctctgctccagcaaccgctggccagatccggctagggactccctcccactccacagcaggatccaggaactggtccctattgggcaatcattaatcggattcttggcattcctctgtccctggccagcatgctccccactggagaaggagcagagggccaggactggcatttggacatgcagctgcccagcaaggtggtgctgtccgcagctgcgctgctcctggtaactgcggcttacaaactctacaagtccagacctgccccagtcgggcaggcagggagaaacaacaaggaccacaaagcagaaaatgaaacagaggccttgggacaacttgccttccaggaggctccaccggggaccctgccaaggggtcgaagacgcaggaaggccagcaagggggctgggacctcactggactacagcttggtggatccagaagacccctgcatcctggacatttccaggtctgaagaggccacaagaaaaggctctgatgaaagtcagggcaggcagtgtccagactctcagcaggtgcctcctccctgtggtggccaggaagccggaacagatgttagaggtaagcccaaccctccccacctccctcattcaggctgtgaacctacgagctcctcaggcagacttatcccaggagtgggtggcagctgtgtgggtgacaagctctctccatggccagacagcagacccccagaggaaacaggatctggggacctggaagcccccaacggttggactgatcttacactggtcaatggtgacatgaaccagagttggatcttcacccacatgacaggggtcagcaggggagaggccggggtcctccaggctgctgcagacatgggcttggccacgcagcagcaggaaggagccaccaacgcctcccatactttctcatctgtggcccggatccggatggaggagaatattatacaaaaggcagagggaccagggctgaagggcagagtatatgactatttcgtggagtccacgtcgaaggctgactccaggccagtcccctgcccagcagctctggctgatgctccatcccctgggcctggaccagagccccttgtcactggagcagcctccagagacgaagccgctaacacagccggtggtggtgcatctgaagcagcatccccacagcctgtggcatccccatctgcaccgggcttcagcagaaaggtgagcctcctgcagatcgctgagaacccagagctccaactgcagcctgaaggcttcaggatgccccttcctgcccacctggaccagagagcccaactcagctcagcctgcagccacggggagccccacgtgcagcttgtagctgggaccaatttcttccacatcccgctcaccccggcttcagctctggatgtccgcctggacctgggcaactgctatgagatgctgaccttggccaagaggcagggcctagagaccctgaaggaggcagcctacaaggtattgagtgataactaccttcaggtcctccgcagcccagacatctatgggggcctgagcggagcagagcgggagctgattctccagcgcaggttccgtggccacaagcgcctggtggtggcagacatgtgtccccaggatgatagtggccgcctctgttgctatgacaatgtgcaggatgcttggcaccctctggcccagctgcccccggaagccatgtcccggggttgtgcactctgtaccctattcaattatctgtttgtggtgtctggctgccaggaacctgggggccaaccctccaaccgcgtcttctgctacaaccccctgacggcaatctggagtgaggtgtgcccactgaaccaggctcggcctcactgccggctggtggccctggaggggcacctctatgccattggaggtgagtgtttgaatacagtggagcgttatgaccctcgcctggaccgctggacctttgccccgcctctcccaaacgatacatttgccctggcacacacagccacggtgtgcgccaatgagatctttgtcaccgggggcagcctgcgctacttgctgctccgattctcgacccaggaacagcgttggtgggccggccccaccgggggcagcaaggaccgcacggccgagatggtggctgtgaatggctttctctaccgttttgacctcaaccgcagcctgggcatcagcgtgtaccgctgcagtgccagcacccggctctggtatgagtgtgccacataccgcttaccttaccctgatgccttccagtgcgccgttgtggatgatcatatctattgtgtgggacgcaggcgcatgctctgcttcctggcggaccacatctcacccaggtttgtgtctaaggaattaaagggtttcccttctgcacggggcacccttctgcctgccgtcttgaccttgcctgtcccggatgtgcctcagacccctgtctagcagtccctcagctgggctccatcaggattcagaaaaacccctttgcctatcactctgggtaagaagcaggcaggaacatgacaggccgtggagtggaaagttctctctcctgtaccacaggctatggggccttggaggattcttgaaaagccacattacaggtctgccacaacattgaagccagagcctagcattccacgacagctggaatctcacaacttcgtgagtgactgacccagcactgtgattcaagtcagaattcctggtaggggcggtttcaggatcccacagaaatgaagggacacagtcttctcccaatcacagttccaggggccagggtacctccagaggatttctcaagctggttggttttctgtgtgctaccatagaccaccttcttaagcaatggtctcaccaattcctaagcattgaggcccactttagaagcttctagaagcacctggaacacaggtggaaagaactgaaggagggtttgggcaggagcaggaagcagctcaggatagccctgaggtttggccagcaggacaggcacagctgaagctgaaggcatccacagtaacactgtttgagagcatattgaccaaggcccacttttgttgttgttgttacctcaggttctgtgtgctggaaggagaaaggcatccatcttgacaggagttctatttgcatattaatcattgcacaattgaggtcttaggaggcagatgtggttccaggctcccttttccgggcccctgccacgcccacaaccacctgacctcaatagaccgccccccccccccccagagttcagaatcctctctgcctgggcagggcagccaccattcttcagnnnnnnnnnnnnnnnnnnnnatatttgctgatctgagttatttgcatggactgagataacttaacctagaatgtcggtggtaagatctctggaaagtaagttgccataattgcctctgtgtcccctgctgctgctccttcgtgaacccacatagccatctactctccctgcactcccgcccacgcagtcaccttttgttcaggccttgctttccctgcatcatcacggcagtcccggcctgggtttggtttggggttttggttttgttgtatggcactttcgtactaggaatttaaccctggaccgcacctgtgctgagcactgacttagcagggctaagcttcagccccacctaaccattctgttcaatatcagtgccttctccatgacaccagaagatgtcaacagaatactgcacatctcagggacaaaaatggaatactgttttatcgaacctaaacatcttttttaggtcatcaaaatatctgtcacttgcaagaaaactatgaaataggtcatttctcaaagacaatactttattaatgccaaatttattacctactacttggtctcaccacctgtctacttttacatttttgtgttactatgtcttgtgtgtgtttggggagggagtggtgtgtgtgtgtgtgcgcgtatagaaaccagaagactgagtaatatgttgttcttcaagcaccatctacttcttttttcagcaggggtcgttcactagcgcctggggctagacagcttgctaggctaactgtccagtgagccccaggatctcctgtctttacacccgaggcactggctcggcttttacacgggtgcgagcaaccagacttgggtgcctgtccctttgcagcactgtactgactcagccatctcctcaggcccagtcgtctttctgaagacattccactctgtaatgtgacctgcagcagcactaattattaatagctgtacttaaggcctcccatgctcgggaagcagtgcgtgcaggacagctgcagaacgtccagcaggattcataagatactgcttgctttccaaagtgcagaggggttttggatttttggttttggttttggttttttgagacaggatttctctttaatcccaacatgggaggcagaggcaggtgcatctctgagttggaggccagcctggtctgcagaatgaattccaggacagtcagggctctgttttacagagaaaccttgtctcaaaaaagacaaaagaaagaagttaaaacagtatgtgagttagaatccataaaaaatggtaggtttttggctattaatgtagtttcctaactggtctccttaatgtcctatgtgagcatgttgtgcttttacttttatgttttcccaggccactaacactagaacagctcactagacacaatacagagtctgtcaagggggtcatagggtctgcatctgctttcttcttccattttgtctcccactagccctcttgaacctgctctatcccatagtctatcactttcctccaagcataagagtgactggaaaggatctgaaatctaccctctgctcaaggcagagatatgggattagcaccctttcactccaaagccaacgctcttggctcagagcaaacccaagccttggtttctaccactgcatccagcttgctccattcttcctccttcagagccaataagcatccctttctactctttcccaaacagcagccagcgtgacctttgagccataagaaggtgtactgtccctgcttcacctgcatgggactaaccagatgaggactcagtcagtgtcggggcagattcagtgtagtgtgtctcttgagatggagtgtgtatgtctgcagagctagacatagaatgtcagtgttgtttacaaatacggggacatttgtcctgcagctagacaagccttggcagtggggacagtgtgctggaagcctgaacacttagcacagggcccaccctagctttccacaggcacttggctggctcccaccccctacgttgacatctgtgcctttgttgctgagactggacagtgggccctgcctcctggcctgtgtgctgcatttccaatctaacttcaccttttagaaaactccccatggatccggtcccagcaatagttggctcttaacaagcatgagtgaaatgagcagatgcacatgaattcagtggtttttccatgagtggtgatttaaattcttaattttatatccacacacagaatctttatcttctgatcctgaggttttgcttcagattgatggtgttaccgaagacaagctggaaaaatatggtgcagaagtgattccagtattacagaagtactcagaatggacattgccaggttccgtatcctccaaacctgtttacttgtgagcccctctcagaactgtgttactgttaagcagtgcgtctccctgagctggcaccaggtagttaatgcatcctacacctgttacactgaagttccaatcctaagaacagtcccagtgtgtgaggcacctctcaggtagttaggaagcccggcattaaagctgctgatggagcacaggtgggagggagcctctgtgcctgcccgagggcctacacgctgttgttttggtaaggcaaagtgagtggccaaggagtcatgatccctggcacccattccagatggactatcacctcactatgtgatcctggcaggacaccagcatccccagtgtgcttcactgttcgttctcatgtaaggaagggacatgttatctagcaagcttgtcaagataacatgttagagtagctcttacgtgctttgggaaaatggatgtgtcactggaacactcttgccattggaagaatctgactttgtgaggacatcaaagcagaggttgccagaggctgcattaggtctgtcctgtggtgcctcgttacaagccatggcactggtatagagatcactggatgagggaaactgagaaaaaggagtagtttgctgtaggggatgaaggggcacagtgtgctgtccacttacacgccagcattaagttgtcatccccagtggacctgctgtcttagtcaggtttctattgctgtgattaataccgtgatcaaaagcaacttggggagcagagggtttgtttgtattatgtatcctgagctgtagtccattgaagcaagacaagtccagggctgaagcagagactatgaaggaacactgcttactcgcttgttccctctcagcttctcagcctctgcctccatttacctcaggaccacctcaaggacagcatgaccaagggtgggctgtgttcctccttcccatcaatcaagaaaattcaagtcatgcaatgttagcacacacctttaatctcagcaatcaggaggcagaggcagatggatctctgaagtaaggctagcctggtctacagagcaagttccaggacagtcagggctgcacagagaaacccgtctcagaaaaaaacacaaaagaaaagaaaatgccctagcatccctaacaggccagtctggtgggagaactctctcagttaaagttccttctccaataactctaggcaaatgtatgttttcactcaggccaaattcctgcttgatatgccacgtgttcataacaattatgcagagaaatggcttaggagtaaaatacagtactgaattttctggtgtgtttattaagaggctgttggttaaagatgaagaacagaatttgttggtttttttatattggacttattttctcaacatgtttaaaatgataaataaaatcagctaacacttatggcagcctttacttcagttcgcaagggttagctgcacaatgtaaaataacataggcctcatgcagtaaagtgtgaactaaacctgacatctccagttgagttgaaaattatcacaaaaatctgtaagtaatgagttttgattctctctcattaaatataaattgccattgaacatacttaagcttttcaaaataaaatgtttaattcctgctgaggtgttgaatccattcagcaggaaagcagctggtattgggctccaaacccagggtcacctgtaaatgtctgcatttcctgtttgtagctgaggatggttccccaggcgccagaggcgccccagaggacactgaggaggaggaggaggaagcgcctgtatcttctcactactttgcaaatcaaactagaaatgaaagaaagagaaagaaaatgtcagccacccataagcccaagaggagaagaactagttacggtggcttcagagcaaaggggtatgtatggtctttatgtctttgtagcatccgggggacggggaggatggggtgcatatagctgctctaacagtcaatagttaatagattgatggctagcccctaaaccaaagtaaaagcaggactttggatttttaagtaatctaatttgcaaaaacttctcaaactttgactttaccttggaatttttgtttcttttgaggtaattattcttcttaaagtattttccaccaaaaacaccctgagtaaataacacggccgtgtccttcaggcttttgggagtctataagtgtttgctgcactccctctgctgcaggattctctgggtctctctgctattttttgagacagggtctcctctatcacagtctgcccttgaacttagtttaaagccaaggttgaccctgactttatactcttcctgcatccacctcccaacttctgagattacatgtgggccatcacacctggtttatgcaatgctgaggtccagcccatagcttcctacaatctaactgagcactgctagcccagcgcattccccaccctccctgctacttttaatgcccgggagactgggtctcctagtcttggcaggatagctgagaggagaccacttggggaaatccaaaggccagacaagccaagtttccttgggggctgtgtaagtggtttctgtcttctcctccctttgcttggctgcagcatgtctgcacaggagaagcgaagtcagagtggccaggtcttggcagcaggcatgttttccaccattggactgtatccaagagtccctccctccccctcttcctccttctcccctgctagatgcccatcacctcctgccctcaatccagagatggtggtccccagagaagtgtatactgtaacagaactgcttagaacaggaaccaaagctgcatggctctgagctgttgtttgcagttttccaccttttctccttctaagtgagaaaaacaagattgagtgggggaagagaaaggcagacaatgtcaccaaattgtcatttcttgttaaatccataaacagacttcttacatgtgctaaccttcctccagagtacacaattaaagacatttgtaaatggtggtttaactttgtggttttgagtgcgcaagtgaccatcagatattcctcagtgaggacattttctcatttccttcatttattcctccccttgggaagcactcatttgcttagttgctcacagagcatgagaccttaaaaagcttctggtccaacccccttgggtttaggatggggaaactggcctggcctgtgttgtgtgggagggaagggcttgcctgaggccagtctcgcctactccgtttcagaggtaggattggacactggcctggcctgacggctcagagcactttcacttctgcgagtctgtggacactccttgaaaccgtgggcgatctgacatctggcttctacttgttgggagggaagagaccaacactgttctttgctgctggctccttcacttcatttgcacagcagctgtttgtgagaaaggagctctttgccatgttgcctgtaatctgatttaataaggagtaaaactcaaatttgcacgaggcataaaggtttactgtagcactcgggagctaggaggcaggaagatcagagtgcaaggtaatctgtggttcagtgccacacatggtcatgcgtgcctcagtgtcagcagttgagaggc

SEQ ID NO: 152 - DNA, 4498 bp, Mus musculus
cggcgcgccgagtttggatggtggttccgcccggcgcgacgtaagcctgagtgaggatcatggctgctgttcctctgaacaatctacaagaacaactacagcgacactcagccagaaaacttaataatcaacccagcctttcaaaaccaaaatctttaggttttacttttaaaaagaaaacatcagagggtgatgtgtctgtcactagtgtgtccgtagtaaaaacacctgcgttaagtgataaagatgtgaacgtgtctgaggccttttcattcactgagtctccactccacaaaccaaagcagcaggcaaagattgaaggcttctttaaacatttccctggaaggcagcaaagcaaggggacctgctctgagccgtcactgccggccacggtacagactgctcaggacactttgtgcactacccccaaaacccccactgcgaagaaactgcccgtggctgttttcaagaaattagaatttagttcttctgcagactccctcagtgactgggctgatatggatgactttgatatgtcagcatcagatgcgtttgcttcactggctaaaaatcctgccacaagagtaagcaccgctcagaaaatgaaaaagactaagagaaacttctttaaaccaccacctcgtaaagccaatgcagtaaagactgacttgactcctccctcccccgaatgcctgcaagtggatttaacgaaggaatcggaggaggaggaggaggaggaggaggaggcggagggggcggactgcctgagcagggatgtgatctgcattgacaatgattctgcttctgaagagctcacggagaaagacacgcaggaaagccagtctttgaaagctcacttgggagctgaaagaggtgacagtgaaaagaagagccatgaagacgaagctgtgttccattcagttcagaacactgaatactttgaacacaatgacaatgattatgatatagattttgttccaccttctccagaagaaatcatctccactgcttcttcctcgttgaaatgttccagtatgttaaaggatcttgatgactctgacaaagaaaagggcattcttagcacctcagaagagcttctgtcaaaaccagaggaaatgaccacacacaagtctgatgcaggaaccagtaaagactgtgatgcccagcagatacgcatacagcagcagcttattcatgtgatggagcacatctgtaagttagttgatactgttcctactgatgaactggaagctttgaattgtgggaccgaattgcttcaacaacgaaacataaggaggaagctcctagctgaagcaggttttaatggaaatgacgtcagacttctgggttctctgtggaggcacaggcctgattcacttgataacacagtgcagggcgactcctgccctgtggggcatcctaataaagagttaaattctccataccttctctcacattccccttccactgaggaatgtttacccaccaccactccaggaaagacaggattctcagccaccccgaagaatctctttgaaaggccgttattgaattcccatttacagaagtcctttgtaagtagcaactgggctgaaacaccaaggatggaaaacaggaacgaaagcactgacttcccagggagtgttctcaccagcaccactgtgaaagctcagagtaaacaagctgcttcaggatggaacgtagagagacacggccaggcttcctatgatatcgataactttaatattgatgactttgatgatgatgatgatgatgatgactgggaaaacataatgcacaattttccagccagcaaatcttccacagccacctacccacccatcaaggaaggtgggccagttaaatctctctcagaaaggatttcttcagccaaggcaaagtttcttccagtggtatcaaccgctcaaaatacaaacctctcagagtcaattcagaattgctctgataagctggcccaaaatttatcatcaaaaaatccaaaacatgaacattttcaaagtcttaattttcctcatacaaaagaaatgatgaagattttccataagaaatttggcttgcataattttagaactaatcagctagaggcgatcaatgctgcgctgcttggtgaagactgctttatcctaatgcccactggaggaggtaaaagtttgtgctaccagctccctgcctgtgtttctcctggggtcacaattgtcatttctcccttgagatcactaatagtagatcaagtccaaaagctgacttcctttgatattccagctacatatctgacaggggataagactgactcagaagctgcaaatatttacctccaattatccaaaaaagacccaatcatcaagcttttgtatgttactccagagaaggtctgtgcaagtaacaggctgatttctactctggagaatctgtatgagcggaagctcttggcacgttttgtcattgatgaagcgcattgtgtgagtcagtggggtcatgattttcgtcaagattacaaaaggatgaatatgcttcgccagaagtttccttctgttccagtgatggccctcacggccacagcgaaccccagggtccagaaggacatcctcactcagctgaagatcctcagacctcaggtgtttagcatgagctttaacagacacaatctgaagtactatgtattacccaagaagcccaaaaaagtagcatttgattgcctagagtggatcagaaagcatcacccttatgactcggggataatttactgcctctccaggagggaatgtgacacaatggctgacactttacagagagaaggcctggctgccctggcttaccatgcgggcctcagtgactctgccagagatgaggtgcagcacaagtggatcaaccaggacaactgccaggttatctgtgcgacaattgcgtttggaatgggaattgacaaacctgacgtgcgatttgtgattcatgcatctcttcctaaatctatggagggttattatcaagaatccggccgagctggaagagatggggaaatatctcactgcgtgcttttctatacatatcatgatgtgaccagactgaagagacttataatgatggaaaaagatggaaactatcatacgaaggaaactcacgtcaataatctatatagcatggtacattactgtgaaaacataacggaatgcagaagaatacagcttttagcttactttggtgaaaaaggattcaaccctgatttttgtaagaaatacccagatgtttcttgtgacaattgctgtaaaacaaaggattataaaacaaaagatgtgactgatgacgtgaaaaatattataagatttgttcaagaacacagttcatcaccaggaacaagaaatataggacctgctggaagatttactctgaacatgctggtcgacattttcttggggagcaagagtgcaaaagttaagtctggaatatttggaaaggggactacatattcacgacataatgccgaaagactttttaaaaagctgattctagacaaaatcctggatgaagacttatatatcaatgccaatgaccaaccaattgcctatgtgatgctaggaacaaaagcccacagtgtgctgagtggccacttgaaggtggacttcatggaaacggaaaattccagcagtattaaaaaacaaaaagctttagtggccaaagtatcccagagagaagaggtagttaagaaatgtcttggagaacttacagaggtctgcaaattgctggggaaagtctttggtgtccattacttcaatatttttaatacagccacactcaaaaagcttgcagaatctttatcttctgatcctgaggttttgcttcagattgatggtgttaccgaagacaagctggaaaaatatggtgcagaagtgattccagtattacagaagtactcagaatggacagtgccagctgaggatggttccccaggcgccagaggcgccccagaggacactgaggaggaggaggaggaagcgcctgtatcttctcactactttgcaaatcaaactagaaatgaaagaaagagaaagaaaatgtcagccacccataagcccaagaggagaagaactagttacggtggcttcagagcaaaggggggctctactacatgcagaaaaacgacttctaaaagtaaattctatggtgtaactggatcccgctcggcctcatgtgcttctcaggcaacatcatcagccagtagaaaactggggattatggctcctccaaagcctgtaaatagaacgttcctcaggccttcatatgccttctcctaacagttctctgcgcatagatcttgtttgtcagcatctgaccatctgtgaatagaaagctgttagtcttgttacagcatttgaagttttcacttctatctattaatatttaaatgtatctcatgtgatagttcttatttttaaataaacattttctttggtgctactgcaaaaaaaaaaaaaaaaaaaaa

SEQ ID NO: 153 - DNA, 4251 bp, Mus musculus
atggctgctgttcctctgaacaatctacaagaacaactacagcgacactcagccagaaaacttaataatcaacccagcctttcaaaaccaaaatctttaggttttacttttaaaaagaaaacatcagagggtgatgtgtctgtcactagtgtgtccgtagtaaaaacacctgcgttaagtgataaagatgtgaacgtgtctgaggccttttcattcactgagtctccactccacaaaccaaagcagcaggcaaagattgaaggcttctttaaacatttccctggaaggcagcaaagcaaggggacctgctctgagccgtcactgccggccacggtacagactgctcaggacactttgtgcactacccccaaaacccccactgcgaagaaactgcccgtggctgttttcaagaaattagaatttagttcttctgcagactccctcagtgactgggctgatatggatgactttgatatgtcagcatcagatgcgtttgcttcactggctaaaaatcctgccacaagagtaagcaccgctcagaaaatgaaaaagactaagagaaacttctttaaaccaccacctcgtaaagccaatgcagtaaagactgacttgactcctccctcccccgaatgcctgcaagtggatttaacgaaggaatcggaggaggaggaggaggaggaggaggaggcggagggggcggactgcctgagcagggatgtgatctgcattgacaatgattctgcttctgaagagctcacggagaaagacacgcaggaaagccagtctttgaaagctcacttgggagctgaaagaggtgacagtgaaaagaagagccatgaagacgaagctgtgttccattcagttcagaacactgaatactttgaacacaatgacaatgattatgatatagattttgttccaccttctccagaagaaatcatctccactgcttcttcctcgttgaaatgttccagtatgttaaaggatcttgatgactctgacaaagaaaagggcattcttagcacctcagaagagcttctgtcaaaaccagaggaaatgaccacacacaagtctgatgcaggaaccagtaaagactgtgatgcccagcagatacgcatacagcagcagcttattcatgtgatggagcacatctgtaagttagttgatactgttcctactgatgaactggaagctttgaattgtgggaccgaattgcttcaacaacgaaacataaggaggaagctcctagctgaagcaggttttaatggaaatgacgtcagacttctgggttctctgtggaggcacaggcctgattcacttgataacacagtgcagggcgactcctgccctgtggggcatcctaataaagagttaaattctccataccttctctcacattccccttccactgaggaatgtttacccaccaccactccaggaaagacaggattctcagccaccccgaagaatctctttgaaaggccgttattgaattcccatttacagaagtcctttgtaagtagcaactgggctgaaacaccaaggatggaaaacaggaacgaaagcactgacttcccagggagtgttctcaccagcaccactgtgaaagctcagagtaaacaagctgcttcaggatggaacgtagagagacacggccaggcttcctatgatatcgataactttaatattgatgactttgatgatgatgatgatgatgatgactgggaaaacataatgcacaattttccagccagcaaatcttccacagccacctacccacccatcaaggaaggtgggccagttaaatctctctcagaaaggatttcttcagccaaggcaaagtttcttccagtggtatcaaccgctcaaaatacaaacctctcagagtcaattcagaattgctctgataagctggcccaaaatttatcatcaaaaaatccaaaacatgaacattttcaaagtcttaattttcctcatacaaaagaaatgatgaagattttccataagaaatttggcttgcataattttagaactaatcagctagaggcgatcaatgctgcgctgcttggtgaagactgctttatcctaatgcccactggaggaggtaaaagtttgtgctaccagctccctgcctgtgtttctcctggggtcacaattgtcatttctcccttgagatcactaatagtagatcaagtccaaaagctgacttcctttgatattccagctacatatctgacaggggataagactgactcagaagctgcaaatatttacctccaattatccaaaaaagacccaatcatcaagcttttgtatgttactccagagaaggtctgtgcaagtaacaggctgatttctactctggagaatctgtatgagcggaagctcttggcacgttttgtcattgatgaagcgcattgtgtgagtcagtggggtcatgattttcgtcaagattacaaaaggatgaatatgcttcgccagaagtttccttctgttccagtgatggccctcacggccacagcgaaccccagggtccagaaggacatcctcactcagctgaagatcctcagacctcaggtgtttagcatgagctttaacagacacaatctgaagtactatgtattacccaagaagcccaaaaaagtagcatttgattgcctagagtggatcagaaagcatcacccttatgactcggggataatttactgcctctccaggagggaatgtgacacaatggctgacactttacagagagaaggcctggctgccctggcttaccatgcgggcctcagtgactctgccagagatgaggtgcagcacaagtggatcaaccaggacaactgccaggttatctgtgcgacaattgcgtttggaatgggaattgacaaacctgacgtgcgatttgtgattcatgcatctcttcctaaatctatggagggttattatcaagaatccggccgagctggaagagatggggaaatatctcactgcgtgcttttctatacatatcatgatgtgaccagactgaagagacttataatgatggaaaaagatggaaactatcatacgaaggaaactcacgtcaataatctatatagcatggtacattactgtgaaaacataacggaatgcagaagaatacagcttttagcttactttggtgaaaaaggattcaaccctgatttttgtaagaaatacccagatgtttcttgtgacaattgctgtaaaacaaaggattataaaacaaaagatgtgactgatgacgtgaaaaatattataagatttgttcaagaacacagttcatcaccaggaacaagaaatataggacctgctggaagatttactctgaacatgctggtcgacattttcttggggagcaagagtgcaaaagttaagtctggaatatttggaaaggggactacatattcacgacataatgccgaaagactttttaaaaagctgattctagacaaaatcctggatgaagacttatatatcaatgccaatgaccaaccaattgcctatgtgatgctaggaacaaaagcccacagtgtgctgagtggccacttgaaggtggacttcatggaaacggaaaattccagcagtattaaaaaacaaaaagctttagtggccaaagtatcccagagagaagaggtagttaagaaatgtcttggagaacttacagaggtctgcaaattgctggggaaagtctttggtgtccattacttcaatatttttaatacagccacactcaaaaagcttgcagaatctttatcttctgatcctgaggttttgcttcagattgatggtgttaccgaagacaagctggaaaaatatggtgcagaagtgattccagtattacagaagtactcagaatggacagtgccagctgaggatggttccccaggcgccagaggcgccccagaggacactgaggaggaggaggaggaagcgcctgtatcttctcactactttgcaaatcaaactagaaatgaaagaaagagaaagaaaatgtcagccacccataagcccaagaggagaagaactagttacggtggcttcagagcaaaggggggctctactacatgcagaaaaacgacttctaaaagtaaattctatggtgtaactggatcccgctcggcctcatgtgcttctcaggcaacatcatcagccagtagaaaactggggattatggctcctccaaagcctgtaaatagaacgttcctcaggccttcatatgccttctcctaa

SEQ ID NO: 154 - DNA, 96594 bp, Homo sapiens
aggccaggagttcaagaccagccctggcaacatagcgagaacctgtctctggaaaaacaatttttttaaattagctggacatggtggcatgtgcttgtactcccagctaaacaagaggctgaggcaggaggatcacttgagcctaggagttcaagactactgtgagccatgaatgtaccactgcactccagcctgggtgacagaatgagaccctgtctccaaaagtaataacagcaataataatgtatatttactctataccaggcattataccgagggccttacgtcacttaatcttcatactaaacttatgagacatgtattactatttctattttacaaatgtagaaaccaaaattcagaattgtaaagtgagtgtggtatttagattcaaatctggtggaagctttattttatgttacttgcaatctgtgaagaaaaaactagatccaagattctaacaggaatttatataatatgattacaaaatgagtttatttataatttaaataaacaaaattcccttttattttctacaacaaacatgctaagattatgtgagtaaacttctcggctaaatattgtattctagggagacattaaacaagaactttgtagttaacattgttctttctgttttatctttctgtacttacagacattttctttcttttttttgagacaagagtctcgctctgtcacccaggctggagtgcggtagtgcgatctccgctcactgcaaactccacctcctgggttcaagcgattcttttgcctcagcctcctgagtagctgggaatataggcatgcgccaccacacctgactaattcttgtatttttattagagatggggtttcactatgtttcccaggctggtctcgaactcctgacctcaagtgatccacctgcctcagcctcccaaagtgctgggattacaggtatgagccactgtgccctgccgactaatacttttttattgtatgccaaatactgtgtataaaataaccttaaaggtcgaagttaataatatttttctctgaatggttgactctattttctgttggcccatgtacctcaaaagaatgataattctatccaatcagaaattgagctgattttggaagagttacggctttacttagatgtggtccacctctgtttttaattatcttgagagagtgagacctgtcatgtattttttgcaggcccctcccttcagagggactccacattccaaactaagagactgcagatcttactctgcctttccagcctaggtctcgagcttagcagctcttggcccccagtctaccccagcactcagcaaatatcccatgggaaaaaaagcctcttatctaggctcctttagactctaatctgttaacaatagcctgagaggccatcaaaagttcagtgtaaaccacactcaatcttcagctttgacaaatgcacccagggagaaaaatgaccagcaatcccagttcacctagcaatgggctcttctttctctgatcccactgctctctgatgttcttatgtctttaaaaataggacttgggccaggcgcagtggctcacacctgaatcccagaactttgggaggccaaggcagttcaagaccagcctggccaacatggtgaaaccccatctctactaaaaatacaaaatttagctgggcatggtggcacacacctgtagtcccagctagtcgggagggtgaggtgggagagtcacttgaactcaggaggcagaggttgcagtgagctgagatggcgccactgcactccagcctaggtgacaagagtgagattgtctataaatatatacacatgtgtgtgtgatttgtataatttatcctttttttgtatgtgtgcgtttttgtttttctggttgttgtagcaggagtgacaacctactgatacctactacatccttccttgtgaataacaacgtatattctcagaagagcgttgttcttaccactgaatatctcagactgcttctaacatattcttagaaaacataacaaaaggcagactatgtataactttaagtttaattgagatctttctccacctacctggtctcttaacagtgttctttgtttactttgctcctgagtggttaggagtgtaaatatcttactagcacagtacattgaaaattcaatgtatttgctataataggatttgttcttcctaagggctttataaaataaacctcgagttttttgtatttttaaaagtctgagctgggcacagtggctcacacttgtaatcccagcacttggggaggctgagtcaggaggattgcttgaggccaggagttcaagaccaacctggacaacagcaggactgtctctacaaaaaataaaaataaaatgtctgtatttaatattattgataggtaacattctcacatgttcaaatgtcaaaaaatatgaaagggtatacagtgaagtatttctttttttttgagacagagtctcactgtcacccagggtggagtgcaatgacaccatcttggctcactgcaacctctgcctcctgggttcaagcaactctcccacctcagccttggactagaggcgcatgccaccatgcccagctaaattttgtatttttagtagagatggggttttgtcatgttggccagactgctctcgaactcctggccccaagtgatccgccggcctcggcctcccaaaatgttgggattacaggtgtgagccatcacgcctggccacagtgaagtatttctatgactcattcctccatctacccagttcccactcccaacaggtattcatgattattagcttcttatttattagaaaagtttaaatgaatatgctagctgacacatatccgaatcattttcccccattctctaaataaacatagcatcctatggctactgttttgcagttcgcctttttttttttaagtataaacgggaattaattggcttatatgactgcaaagtccaggacgtggctgccagtacagcaggatccagggcctcagacaattaattccaccaaaacccagcttctctccttctcttgcctgcactctcctctccggtggctgcatcctcaggcaggctcccctcctagtcccacatccaggatgacaccttaacagtttgggaactccaacagaaagggcacacctattaccacattcccggtagattctagccaaagtcctgtggagggctctcattggcccagctggagtcatcaggccaagccagtaggatatactgattggccaggctgacgtggcagggccacccctggtgttccaggcttgagaagtcagtcccacattggcatgagtttcctggctgaattgagaaaagtggctctccaaagccgtgtcaggctgctgtaagtggatgattttccccaggcaaagattacagatgtctactgcaaaaggcagtgtttttgatgtctttttttttggctctttcatgccaggaagctgctattatgccaaacgcatctgtggctcaggccatacaggaccaaacgaaaagccaaagttgtttacatctttcctatgatcttgtttttgtgggcgcccaaaaaattatattacaaaccctccaactagtcccaagtccatacctctaactaccccctttttctaacacaaagccaatatttcccctgccctaaattaacccaaggctaggtactacagaacccctagagataccgctaatctccaaaacccaccagaattattcagaccacccagtcccaaactttccctgcactgccttgccttccctgctgaaacgctaataaaggttctcgtttaagctttcccttcactcccttctgcctcctgaccaaacctggtgcttcttctccatgtggccctgcatggcgtggtgtgtccctcctctcaggaaatgtggataaattattccttcaaagccactagtctctctgtcatcagtcagtcgcttctataaattaaaatcctacaggtacaactgagagaggggctgctgcgactgagttttcagtcctggaaaaccacactttttttttctgtctctgcaaggctttggcagtctctcctctccacccccttattaatgctggcctctgtttcacaggtacctctctacacgagcaggtgcaaattgtcactgatgggggaaacatgaaacaaactcagatgcctccagggacacgtgagaagccacacttgtttcagcctattgttctcttgagggaatgtgggccctgtgatgatgctagatctttcttttctttctgtaccttcctctcttcttccctctctccttccttccctccttctctccttccctcacaccctccctccctttcttctttcctcttttttaagaaaaactgaaaatctatttctgttttgattggagcttttgtgtgtgtgtaaaatatgttgtgtgtgtgttttttttttccacagcaactgctttttgtgtgtgtggtaaaatatgtatgaaataaactgccattttaacctttttatgagtagaactcaatggcattaattacattcaaaatgctgtacagccattgccacaatttctaaactttttcatccccccaaatggaaactatgaacccagtaagcaataattcctcattcttccctccttcctactctcagttcctgaaacctctaatctactttctgtctctatgaatttgcctattcaaaatctttcatataaatggagtcagatcgtatttgtttttttgtgttggcatatttgactcagaatgttgtagcatgtgtcagagcttcactccttttcatggccgaatgatactccactgtatggatatactactttttttttttttttttttgagatggagcctcgctctgttgcccaggctggagtgcagtggcacgatcttggctcactacaacctccacctgccaggttcaagcaattctcctgcctcagcctcccgagtagctggggttacaggaacacgccaccatgcccggctaacttttttgtatttttagtagagacagggtttcactatgttggccaggctggtctggaactcctgacttcaagtgatccacccacctcagcctcccaaactgctgggattacaggtgtgggccactgtgcccagcttattagatataccacattttgtttattcattcatctgttaatgaacatgtgggtgaaatatgtcaatttttacttgttgcaaaaacaaaacacaccttttttttttttttttttttttgagacggagtctcgctctgtgccccaggctggagtgcagtggcgcgatctcggctcactgcaagctccacctcccaggttcatgccattctcctgcctcagcctcccgagtagctgggactacaggcgtgtgccatgacacctggctaatttttgtatttttagtagagacggcgtttcaccatgttagccacgatggtctcaatgtcctgacctcgtgatctgcctgcctcggcctcccaaagtgctgggattacaggcatgagccaccgcgcctggccaaaacacatcattgttaaataactcctcaggctacccttctctatgggaaaatgcagagtaaatcaacagatttttaatagcaaaatggccaaggaaaaagcaggatagagacaacgcaaagatacaaacaatctaccaaatgaataaagccactaatgttacttaggctcaaacagtatcccccaaagtgagaggctggatactcacaactcgataaagggtgacattcacctgatattgttgctgtctcacatggccttaatcatcttattgcttttgtcttcactgttcttcaattttgtgcccttctctagtgccagccattgtggtaggccctgaagaacaccctcatggagagcatattctgtagaggaagacaggcacactaatagtatcaacacaaccaatacaaatgctgactgctgttatgggaaaacctaggagggatacacaggcagatttggaggattaggtaaggctttccaacttcccaacttctccaacaacttgcagagaagttgtcctgagacctgagagatgaatgagaggtatgatttggaggcaaaggccaggaaactggaaagactataaaacaccttgaggaaatgacaggaaaatggggatgagggacagatgacatatgagaggaagcagggactcaatcggagtttggtattcaccttgaaggcaaatgggagctgctggaaggattctgtgttttttttttttttgagacagattctcactgctgcccagggtggagtgcagtggtgtgatctcagctcactgcaacctttacctcccacctggaaggtagatgttagcgtagggtggtgaaaggcttgtgcactcatcttaatcttaaatatataccttggccaggcaaggaggctcacggctgtaatcccagcacttttggaggctgaggctggcagatcgcctaaggccaggagtttgagaccagcctgggcaacatggcaaaaccccatttctactaaaaatacaaaaattacccaggcgtggtggcatgtgcctgtggtcctagctactcaggaggctgaggtgggtgaattacttgagcctgggaggtggaggttgcactgagccaagatggcaccactgcattccagtctgggcaacagaggcagaccctgtctcaaaaaataaaaataaattttaaaaaattgaaaaaatacatatctcaatgattgtatgtatataatgattttatatataaatgatttatatattactttatctatattaaatgtctatataagacagatatgtaatttccagcactccataagatttccttgggagcttcctcatctacctctgcctccaggggtaacctggtatgcactatatactctttttctcttttttttttgagatggagtcttgctctgtcgcccaggctggagtgcagtggcgtgatctcggctcactgcaagctccgcctcccaggttcacaccattctcctgcctcagcctcctgagtagctgggactacaggcgtccgccaccatgcctgactgatttttttgtattttttagtagagacagggtttcaccgtgttagccaggatggtctcaaatctcctgacctcgtgatccacccacctcggcctcccaaagtgctgggattacaggcgtgagccactgcgcccggccctatatactcttttatctacctctttttgtgctcagcatagtgtctgagcttcatctatattgtatgtaccagtagttcatcctcctattactttgtaatacagaaaaaaactgagaaaagctttgaaatggtctaaaacagattactggggccaggcatggtggctcaagcctgtaatcccagtactttgggaggccaaggcaggcagatcacctgaggtcagaagttcatgaccagcctggaccacatggtgaaaccccatctctactaaaaatacaataaattagccaggcgtggtggcacgtacctgtagtcccagctgctcgggaagctggggcaggaaaatcgcttgaacctgggaagtggaggttgcagtgagctgagatcacaccactgtactccagtctgggtgacagagcaagactccatctaagacaaacaacaaaaaaatgattactgggtgtcattgaaaaacaaggtgcccagctgtccagcttacttttctaggatgtctgattctatgaagactctaaacctttcactgtctttgagctacagaacaactatacaaactatagacacttcttgtctatagaaatgcaaattgtggccgggcacggtggctcatgcctgtaatcctaacactttgggaggccaagacaggcggatcacctgaggtcaggagttcgagaccagcctggccaacacggtgaaaccctgtctctactaaaatacaaaaagctagctgggcatgatggcgggtgcctgtaatcccagctactcgggaggctgagacgggagactctattgaacctgggagatggtggttgcggtgagccgagcttgcgccactgcactccagcctgggcggctgagtgagactccgtctcaaaaaaaaaaaaaaaaaaagaaatgcaaattgttttcagtagaatgcaattgattactaagctgtggatttcatcagttctgccagtttttgtatatatttgtagttatttcattattcctcatttgactatgtgtgtggtactttgaattttccattgaagcagttgtaatctttctggatatctcattcattaatgagttaaataaaatctctaacatttattttatatctgtattatatttgatattaaaattattcttcaacagtagtatacagttatatgaataagctgcaatttatctattcatctattggtggacatctgggttttttccctttggctattatgaataaagctgctatgagtcttttggtgaataaaggcattcattttttggggtaaatatctagaaatgggatttctggggtatagggtaggggtaaatttgatttcagtagagactgatgtttccaaagtggttgtaccattttacactcccatcaacactgtatgagagtcccatttctgcatctttgcaactaagggaattgtcagtcttttcatttcagctattctatggagtgtttaatagtatcatattttggtttcaatttaccatagaagattttcaggagggaggtaacttgaacagatttttacattttagaaaactctttctgcgtattatgtggagaatgattatttgtataccaaagttcatagcagcattattcacaatagccaaaaggtgggaataaccaagcatccatttatatggatgaatggataaacaaaatgtagtatacatgtataatggaatattatttagcctcaagaaggaagaaattctgatacatgctacaacatagatgctccttgaagacattatgctaagtgaaataagccaatcagaaaagagcaattattgtatgattcaatttatatgcggtacctcgcacttacagacagaaagtgcaatatcggctataaggggttgtgagaaacgggtaacggggagttactgtgtaacaggcagattttctatttgggataatgaaaaagttctggagatggatagtggtgatggtttcacaacaatgtgaatgtacttaatgccagtgaactgtacacttaaaaatggtgaattttatgttagatagattttatcacacacacaaagaggagggagggcgggagggaaggagagagggaaggaagtagagaggggagaagagaggaagaaaggaaagaaagtaagatctggcatcacagggcccacattcccgcgtgtcagcaataggctgaaacagaagcatggtttctcacgtgtccatggaggcatctgagtgtgtgcccactttcccggttcaatgacaatttgcacctgctcgtgtagaggggtacgggtgaaacagagaccagtattattaaggggatggagaggagagaccgccaaaacatcgcagagacacaccgtcggagccaagagaatggggtgcagacgcctggcttggcctgtgggaactggcaagtctcagctctcaaacgcccgggcttttcaacccgccacagccgggttccagctgcctacttcctttaaagccttcaccgactctaaaacaccaaaaacaaagacccaactagctccggaagcccgagatgtaaccgtagtcatctgaccctcccgtccggactctgattgggctttggagatacgcgtccctcccggcgctgtacggcgaccccgccccagcagcctgagggggcgggaacagatgtccgagtgcgacagtattggtcggcttccccaggaagcagccaatcggaataggcaagcttccggcgggaagtgagccagggcttggcgcggcggccgtggttgcggcgcgggaagtttggatcctggttccgtccgctaggagtctgcgtgcgaggtgagtaccgcgcgcgtaactacgggtcggtccgcattgatctagccctgctctggcggcccggcccggagctggaggccgctcgggttcttccgtttcctgcactggttcgcctcggcccgctgagtcctctagtctggccaacatcctgggaggacagcagatacataaatacgttcccaaatggggaaacagaggcccggggcgggggcgaactctgccaaggtctcccggggcgtcggaggccgagcatgggctaggacctggcatgttgttgcccatatactccagtgcgtaacatgatgccctgcacagagtaatcccagcccagacctctggcactactacctccgtgtccctcctgaggaacaacgaaaacactttgtactttttctgtggccttccataatcacgagctgggctactcttgtttttgagtgtctactgtgtgccatgttcctggcacccttgatcttacaactgtagctttacgatatcccagcaaagcgaagtgcttaagaatactgcatcagattgcttgggttcgaattctggctccttcacatttagctctgtgtctactgcacgttactgaaacactaagtgtcttggttttcgtctgtcatatgggggaaatggtctcttctacttcctggcgtttttgttaggattaaacgacttaatatatgcaataataaatgcttcgaaggctacctgttacatagtacacagtaagggttctgttatcattacccagagaagcggatgaaattgtccccattttagacatggagaatctgaagtacaaagaggttgtctccgtacagaaagagcatttggtgattaagtgctagagatacaggatttgaactaagcgcctgattttaaagtatgtcccacaacattaggctttctcctatagccctcacctgtccttaggtcacacagaactttaggtacctcatggcgtgagatggagcaggtgactgacagctccttgtgccacccatgcagataaataacactggtgtgtcactgtcaagattaagggacaggaattcgagagactgcatgagagatcagaagatgaagaagcgggtaggcaaaagtattctgtttggggaatagtaaatagaattaattaaatcaacattttgttagctgggctgcttatactgtcagacagtagcttataatctactgggaagaaatgaaatttctgggtcctgtgtcactttcaatgccactcaccatgacaggtaccttataagtatagtttacagtcctatcagtaacctggagaagtagttatttccttcgttttactgaggaaaccaagagttaaaaaatcaggaaaagtgttagatgtgcagtagaacatcatcatgctgggaagttctacacatccgcttcaggacaggtggtattacctatgagcaggaagggaagggaaaaaggtaaggggaatgagtgatagtttattgttttgatttttaaatttttatctgttttttcctttttcatagtcattcctggaatgagtgagtttgtttttgtttttgtttttgggggatggagtctcgctctgtcgcccaggctggagtgcagtggcgcgatcttggctcactgcaagctccgcctcccgggttcatgccattctcctgcctcagcctcccaaatagctgggactacaggcacccaccaccacgcccagctaattttttgtatttttagtagagacggggtttcactgtgttagccaggatggtctcgatctcctgacctcgtgatccgcctgcctccgcctcccaaggtgctgggattacaggcgagccaccgcgcccggccatgagtgagattttaaatatatctgaaatgaggccaggcacagtggctcacacccataatcccagcactttgggaggatgaggcgggcgaatcacctgaggccaggagttcgagacttgcctcaccaacatggcgaaactccctctctatagtaaatacaaaattatctgggcgtggtggtgtgcgcctgtggttctagctactggggaggctgaggcacgagaatcgcttgaacccaggaggctgcagttagtcaagattgcaccactgcactccagcctgggtgacagagtgagagtccgtcagtcaatctacctgaaatgttttatgcctttaaaagagagagaatagggccgagtttaactttttaaatttggttggtgggtacatgggtgtaattctattttctgtatctttatgtaagaaatattaaaaattaaaagatatacatatatattttaatttacatatatatgtgtttttttctaagagaaaaatggatagaataaagaggtccaagataatcgtagaataatcctaggacttcagtgctgaaagcccctaagggtctccactacctgtaggataaaatctaaactccttggcatgataccagaggcttttgagcattctgtatcgctaacacatactattctacctcagcctttgtaccactagttcatagactactcttcttcacaacctcagtcctgtctgtaaagttccacttgtccttcaatatccaattcagtgttctttgaaaagcttctctatcatttgcctgtttttccttaatctgggaagccatagtcttttaagaaaagacttgattgtcagacttatctcgttgcattgtaattatttgttgacatgtctattttctgctagtctataagctccttgaaggcagtaataatgtctttcccatctctgtacttcagtgcctaccatgatgcctggcacagagtagtcactgtagatattagctgaatgaaaaatacaagttgaagacagagagtgaaagttcttggagttatgacatatggactttgttctctggaatgacagggaactattgagtttactttctttaaaaattcccgtattttattgaaacatattctcaatgtcaagaaaaatattccagtcataatcctatctttcaaacacttgaactatttttattttccatgagtcctttccaaatttcagctataaaattagttatacagatttagctatacagatttcttaggtagctgtagccttaatgtattcataacttagtgtttttcttttttctttctttttaaacctgacacttgaggaattttttttttcttttctttttttttgagatagggctcactgcagctccagcctcccgggctcaagtgatcctcccacctcagctgggagtacaggggtgtaccaccatgcctggctaattcttgtatttgttgtagagatgggcttttgattttttgtagagatagggtctcgccgtgttgttcaggctgatctcgaactcgtaggctcaagcagtttgcccacggagtgctgggactacaggtttgagcccaccgcacctggcctgcttttttcaatattaaattatttcctggctgggcgcggtagcacatgcctatgatcccagcactttgggaagccaaggttggggattgcttgagcctgggagttcaagaccagcctgggcaacatggcaaaaccccgtctctaccaaaaaataaaataaaaatctaaataaattatttattttagtgaatcagtctttatgcttgtcatttgtcttataaattttcgcaatattcctctctctttggtttaataggtatgaaatgatgctccatgttattattagaaaaatttcacaattttttcataaatttacttagtgtctgtatattctggtgagctgttgtgtttatattccctgaacatttgttcactggaactggatgttctttatgtgtttttaatattaatcatttatctgttatttgttgctaatttttcttttcttttttctttttttgagatggagtctcatcctgttgctgaggctgaagtgcagtggcgtgatctcagctcactgtaacctccgtctcccgagttcaatccattctcctgcctcagcctcctgggtagctgggattacaggcacccgccaccacgcccggctaatttttgtatttttggtacagatggggtttcaccatgtcaggctggtctcaaactcctgaccttaggtgatctacccactttggcttcccaaagtgctgggattacaggtgtgagccactgcatccagcctaatttttcttttaaaaatatttttattggccgggcacagtggctcgcgcctgtaatcccagcactttgggaggcctaggtgggcggatcatgaggtcaggagttcgagaccagtgtggccaacatgatgaaaccctgtgtctactaaaaatacaaaaatcagctgagcatggtggcacatgcctgtaatcccagctacttgggaggctgaggcaggagaatcacttgaacccaggaggcagagattgcagtgagccgagatcacaccactccactccagcctggcgacagagcaagactgcatctcaaaaaaaaaaaaattttctttattatgacaaccaagatacatttgtaaaaatatacataatttcgctggaaaccaagagttaaagtggctcacgcctgtaatcccagcactttaggaggctgaggcaggtggatcacttaagggcaggagttcgagaccagcctggccaacagggtgaaaccccatctctttttttttgagacagagtctcactctctctcccagtctggagtgcagtggcgcaatcttggctcactgaaagctccgcctcccagcttcatgccattctcctgcctcagcctcccaagtagctgggactacaggcacctgccaccaggcccggctaattttttgtatttttagtagagaccgggtttcactgtgttagccaggatggtctcgatctcctgacctcatgatccacccacctcggcctcccaaagtgctgggattacaggcatgagccgccgtgcccagcaaaaagcccatctctactaaaatacaaaaattagctggccatggtggcccatgtctgtaatcccagctacttgtgaagctgaggcaggagaatcacttgaacctgggcagcggaggttgcagtgagcctagatcaggatcacgccattgcactccagcctgggcaacagaatgagactctgtctcaaaaaaataaaataatttaaaaaaagttacataatttaaagaatagttacaaagaaattacaaagtttagttatgcataaaaattatattgtattcatggtaaattgaagactcattataaaattatagttacacataactatcatctagatcaagaaagaaatagaatattaccaggatcccaggaccccagaagtgtatctttctgatacctcctccctatgttagggataactattgtcccaattatgtatttatttattttgagacggagttttgctcttgttgcccattctggagtgcagtggcgcgatctcggctcactgcaacctctgcttcctgggttcaagcaattctcctgcctcagcctcccaagtagcttggattacaggcgcctgccaccatggctggctaattttttctatttttagtagagacggggttacatcatgttggccaggctggtcttaaactcctgacctcaggtaatctgcctgcctcggcctcccaaagtgctgggattacaggcatgagccaccgctcctggccctattgtcccaatttttgtgataatgcttttcttgtcttcatagtttgccctgatctatacatctataaataatatagctcagttttgcctggttttgagctctgtaaatgggataatactatatgcattctactgagtctttctagtttgcgttattatgtttgtgagattcttccacgttgtagatatagtttttcttttctttttttttttttttaatagtaattttggctgggcatggtagctcacttctgtaatcccagcactttgggaggctgaggaagcaagatctcttgaggccaggagttcaagaccagtctggcaacaatgggagacttgtctctataaaaaatttaaaaaattagttgagcatgatgtcatgcacctgtagttccagattctccagaggctgaggcaggaggatcacttgagcttaggagtctgaggctgcagtgaactatgattgtgccactgcgctctagcctgagtgacagagcaagaccttgtctctaaaaaaaaatttttttaaattgtttttcttaacctcttaacagagttttacatgtatagtaccacacagccacaatgttgtatggcagatctctagaatgcgttcattttgcattactgaaactttatactttttgattaacaactccccatttcctgaaagcccctaccctggcaaccactgtgcccctctttgcttctatgagtttgcctattttagatacctcgttgcagtggaatcatgtagtatttgtcctgtgactggcttacttcactttgcttaatggcttcaaggttcatctgtgtcatctcatgttgcaggattttttttttaattttttattatttaacttaattgtattgtattttattatttttcagacagggtcttgctcagctatccaggctggagtgcagtagaatgatcgttgctcactgcagcctctaactcctgggctcagatgatccttctgcctcagcctcccgagaaggtgagactacaggagtgtaccaccatgcttggctaacttttttattttttgtagatactgggtcttgctttgttgcctaggctggtctcaaactcctgggctcaagcgatactcctgccttggcctcccaaagtgctgggattacaagcatgagccacttcatctagtcaatttttttctttttaaaggctgaatatttcattctatgcgtataccactgtaaagaaaactccatttcctctctactctgtacccatataataattcctcacttctgtcaccaaatgtgtggtgttttttttccccacaatagttcagttctttagcagacactgggtgtcctacatttagctcaggtctgacactaactgccaggtgttagtgcagaccccaaatgttaagtcctccctgtccacccgcattccagaccccccacttcagactacaagcacaagtggtaagtcctccacattcagtcacagaacagtttccttactagattatcagcttattataaacaactcagaagcagccagctggaagaaatacacaggacaaggtatgtgggaaggggtgtggcacttccatgccctctccaggcacaccagcctcccaccatctctacatgttctcaccaacctagaagctccctgagccctatccttctgggtttttacgtaggcctccttacctagacatgattgattaaataattggccattggtgattaagtcactccccagcccctttgtcctacccagaggaagttttgttttgttttttgagaaggagtctcactctgtcgcccaggctggagtgcagtggtatgatcttggctcactgcaacctctaccagctgggttcaagagattctcatgtctcagcctactgaatagctggggttataggtgtgcaccatcatgcctggctaatttttgtatttttagtagagagagcgttttgccatgttgtccaggatggtctcaaactcctgacctcaggtgatctgcccgtctcggcctcccaaagtgctgggattacaggcataagccaccacgcccggcccccagaggaaggttttattgaattaattacaaactgataggtcaaagagtgtgtatgttttaccttactatgtaatactaaattgttttcaaaagtgcttgcactcccaccaatgtattagattttccgttgctctgcatgctggctaatactttatatttacatttttattttccaatctggtatattcatgtatagtagtattttctggtagcattcatttctctgattattagtgaagatgagtaccctgatgtgtttatgggctatttcctcttttttacagtccctttttttttttttgaggcggagtctcactctgttgcccaggctggagtgcagtggcaccatctcggctcactgcaagctccgcctcccgggttcacgccattcacctgcctcagcctcccaagtcccaagtagctgggactacaggcgcccgccaccatgcccggctaatttttttttttttttggattgttttagtagagacggggtttcactgtgttagccagggtggtctcaatctcctgacctcgtgatccacccgcctcggcctcccaaagtgctgggattacaggcgtgagccaccgcgcccagcctacagtccctttttttctgtcttctctattaagttgtctctgttttatgtacatataaacatatttatatatagttatctacatttttatatatacgtacatacacatttacataggtgtagcagatatcttctactttggctttttaagtggatttaacataattttagtcaatgactttttttatttttacatttctttaaagtgacataattgtaccccaacaatttatggggtacatagtgatattttgatacatatactgtataatgatcagatcagggtaattagcatatctatcatcttaaaacatttatcatttctttgtgttgggagcattcaatatcctccttctagctatttgaaactgtatagtacattattgttaactgtagtcatcctgtagtgctacagaacaccagaacttattcttcccatctagctgtaattttatattcttttctttcctttttttgagatgaagtttcactcttgttgcccaggctggagtgcaatggcacaatcttggctcactgcaacctctgcctcctgggttcaagcaattctcctgcctcagcctcccaagtagctaggattacaggcatgcgccaccatgcctggctaattttgcatttttagtagagacggggtttctccatgttggtcaggctgatctcaaactcctgacctcaggtgatccacccacctcggcctcccaaagtgctgggattacaggcatgagccaccacacccagccaattttgtattctttaacaaatctgcccctacccttcccagcctccagtgtcctctgttctagattttacttctatgagagcaacgatttttaggttccacatatgagtgagaacatatggtgtttaactttctgttctttattccacttaacacaatgtcctcaggttccatgttgctgtgaataacaggattttattcttttttatggctgaatagtattctgttgtataaatgtactataatttttttattcattcatcgcttgttgaacaccttggttgattccgtatcttggctattgtgaatagtgctgcagtaagcatgggggtgcagatgtctctttgatatactgacatcttttcctttggataagtgttcagtagtgggtttgctgaatcatatggtaggtctatttgtagttatttgaggaacttccatactgttctccatagtggctgtactagtttatattctcaccatcagtggaagtgtaagagttctcttttctctgcatcctcaccagcatttgttattttctgtctttttgataatagctttcttaactggggtaggatgatacttcattgtgtttttgtttttgtttttttaatttttaaaattttttgtagagacggagtcttgctgtgttgcccaagctggtcctgaactcctagcctcaagcaatcctcccgcctcagcctcctaaagtgctaggattcaaggcatgagccactgtgcctggccctaattgtggttttgatttgcactattttttttaacatcttttattgtgaattattgtatgttatatttcatagatataacttgtacgtgaatgagctaatatagtaggcctgaaactgttaccttcagaaaagcctgcttgcaaaattggtccctggctgtgtctgagaacttggcttttgaaacctttcctacactgatcaggttgttttactaatacctgttttccttctgagagtctgaaattttggtgggaggaaggtgcctaagtgaccagccctcaataaaacccctagattcagagtctctaaccagcttcttttgggcagaaacattgcacacacatagctgcattttcactgagagaacatgcactttctcaggggttagagagcattggaagcctgcacgtgaattcctacagacactacctgatgtgtttttttttcccttgctgatctggttgtgtatccttaaagtgttgatgatataataaatgttagctgtgagtacaactgtacactgagtcccatgagttcttccagcaaaatattgaacttagctgttaagttcctccagaaaaaaaaaaagctggaattttgattagaaatgcatcaagttatagatgaatttgaggagaattagcatctccatatcgtcttccaatgtgaatgtggttcatatgattgtttcctccctccttgacttctcttaacgactttcaattttcttttctttttttgagacagggtcttgctctctcacccaggctagagcaagtggtgcaatcacagcttactgcagcctcaacctcctgggctcaggtgatcctcccacctcagcctcctaagtagctgggaccataggcacatgccaccatgaccaacaaatatttgtatttttgtagagacagggttttgctgtgttgcccaggctgctctcaaactcctgggctcaagtgatctgcccaccttggcctcccaaagtgctgggattataggcatgagccactgtgcccagcccaattttctgaatagatatcaaggacataatttgttagatgtatttttaggtatatattattttctttaaattttttttgagacagggtctcactctgtcacccagactgaagtgcagtggcgtgatctcagctcaccgcaaccaccgccttccaggctcaagcaatattcctgcctcagcctcccgggtagctgggattataggcacgtgccactactgccaccacgttcagctaatttttatatatttagtagagacggggtttcaccatgttggccaggctggtctcgaactcctgacctcaaatgatccacccaccttggcctcccaaagtgctgagattacaggcatgagccactgcacccggccgggtatttaaatttttgatgtcatcttaaaaagttttctgacattttattttttgtttattgatgatatagaaaaacaatttatttttgtatattgaccttgtctccagcagtcttcctaaacacactgtcttagttttctatagctgctgtaataaattaccataaacttagtggcttaaaacaacatagaggccgggaacattggctcatgcctgtaatctcagcagtttgggaggccaaggtgggagtatcgcgggagcccagaaattcgagaccagtctgggcaacacggtgagtccctgtctctgtttaaaaataacaataacacacggtagctcacacctgtaatcccagcactttgagaggccgaggcgggcaggtcacctgaggtcgggagtttgagactagcctggccaacgtggcgaaactccatctctactaaaaatacaaaaattagccaggcatggtggtacgcgcttgtaatcccagctactcaggaggctgaggtaggagaattgcttgagcccaggagacagaggttgcagtttgccgagatcgcgccactgtactccagcctgggcaacaagagagaaactcagtttcaaaataaataaataaaataaataaaaacaacaacaacatagatttattatcttatagttctgtagttcagaagtctgaatgggtttcattgggctaaagtcaaggtgttggcaggctgagttcccttctggaggctcaagggcagaatccatttccttccccttttcagcttttagagactattcgtattccttgactcttggctttcctcctccattatcaaagccagcaactttgagtcctcctgaagttgccatctttctggtctgtcatcttatttcctcttccacttaaaaagacacttgtgattgcattgggtccatctggttagtccaggataatcttcctattttaaggtcagcttattagcagtcttaattccgtatgacagtaattcacctttgtcatgtaaccaagcatattcacaacatccaaggatcaggatatagacatctttggatgggtatgggagatggggatagtggtggtggtcacattattttgcctcctgcattcacttaagatttttatttttatttttatttttatttttgagacgaagtctcgctctatcgcccaggctggagtgcagtggcgtgatctcggctcactgcaacctccgcctcccgggttcaagcgattctcctgcctcaacctcccaagtagctgggattacaggtacgcgccaccatgaccacctaatttttttcttattttttatttttagtagagacagggtttcactatgttggccaggctgatctcgaactcctgacctcgtgatccacccacctcggcctcccaaagtgctgggattacaggcttgagccactgcatccagccaagaattttaataatttaatctgaagattcttttagatgttccacacacaaaattatagcctttgtgaatattaatgattttacatctttccagttaacacgccttttatttattgttcatgatctactgctctggcttggacttccagtatatatctgataaaagtattgatagtgggcattctggaattgttcctgatctaaaaagaaaagtttcctaaacttcaccttactgtattctctctgtcaggttatagaagttcctttctattcctgtttgataagagttgtgtttttttttgttgtttatttttgaggtggagtcttgctctgccacccaggctggagtgcagtggcgcaatcttggcccactgcaacttccgcctcccggttcaagtgattctcctgtctcagcctcccaagtagctgagactagaggctgcgtcactgcgcccagctaatttttgtattttaggtagagacagggtttcaccatattggccagactggtctcgaactcctgaccttgtgatctgcccgtctcagcctcccaaagtgctgggattacaggtatgagccaccatgcccggcgtgataagagttttcattatgaatggatttcactgtgaatggatgtttgattttatcatatgcttattctagaagtcttgagacgatatggttgttcagctttaatgttgtggtgaattatattaattgatttttaaatgttgaaccacttctgagtcattttttagacaacacaacttggtctcggtattttttattttatttatttatttatccttttagacagggtctcactctgttacccaggctggagtgcagtggtgtgacttcagctcactgcagccttgatctcccaagtcatcctcccatctcagcttcccaagtagctgggactataggcaagtgtcaccatgcccagttaatttttataaatttttgtggagatgagatttaatcacactgcccaggctggtctcaatcctgggctcaagcaatcctcctgccttggcctccaaaagcgctgggattataggtgtgagtcatcatgcccgtggctcttggtgtattttatacatggctagatttactttgctaacatattgtttgggacttttgcatctacatttatgaaaaagaattagcctggagtttttcactgaggagttgcccttacaggacttagtatcagagttatgctagcctcacagaatgagctggggagttggttctttctatattttggaatcgtttatgtaaaactggaatattttactgccataagtgcttagaagaactcacctgcgccactctggtcttgatgctatctttgtgggtagatttttgaccatcaataggacttctttaatggttataaggctattaggttttctgtttatttttgagtgagttttgataagttaatttttaaggaatgtgtccatctcatctaaattttaaaatttattgatgcaaagttgttcataacagcctaatgttatcttttaatgtctatagcatatgtaattaaatctcgtctttcaatctcttcttttttgtctttttacagaacaaacttggtttattgatcctctctattatatatctattattttttactcttaaaaatttttttaaaaatctatttatttatttattttgagaccggtttatgaaactggctaatttttgtatttttggtagagatgaggtttcaccatgttgccaaggctggtcttgaactcctggcctcaagtgatccacctgccttggcttcccaaagtgctgggattacaggcatgagccaatgcgtctgaccctcttctctttaaaactgcctcccttctattttcatcaggcttattttttcagtttcttttctaataattagggtcatccattttcttgtaactacttctttagttgcatattagatatttttatgtgtagatttccattattcagtttaaagtatatttgaatactcactatgatatcttacttgactgatggcttattcacaagtatatttcttgattttcaatacaaagggattttctagatctcattttctttattttgaaattttaaaaatctacagaaaagaaaacctacagaaaagttgaagaattagtgcagtatatcatcttcccaagtaaacaatttacattcataaaaatagttcatatattaggtaacaaggaaaacattagtaatttcataaagtagaaatattataattctgatcaccatgcaacaaaactagaaattaaaaatgaaatttataaaaaagcagaaaggcccttccatctggaaaattgaaaacaactattggatgtaaggaaaacagaaactgaaataaaggatttctgaaaattaacgaaatgaaaacacagcatatcagattcttaaaaaaaaaaaaaaggtaaggcactagtcaggggaaaatttataatcttcagtacatattataaatgaagaaagggaaataatgaaataaattccaaacttagaaagttaggaaaagaaaaacaagtaaatcgaaagcacaagagaataaataataaagataaaaagagaaattagtaagagaacaggaaaacatctgattcaaaaattaagatttttatcttggctgggcgcagtggctcatgccagtaatcccagcactttgggaggccgaagcaggcagatcacgaggtcaggagatcaagactatcctgtccaacacggtgaaaccccgtctctactaaatacaaaaacttagccaggcgtggtggcatgcacctgtaatcccagctactcgggatgctgaggcaggagaattgcttgaacctggaaggcagagtttgcagtgagccgagatcgtgccactgcactgcagcctgggtgacagagtgagactatgtctcaaaaaaattaaaaaaaaaagatgtgtatcttgaattgtttaatgaagcaaataaattagcctaatagaaattacaaatatacagaataagaaatggtaagtggtaagtaaccactgacacaggatagtttttataacaggattaatttatgtacctttacgtaaacaaatttgaaaactaaaatgaaatggataattatgtgtgaaaatctagtttaccaaaattgactcaagtagatgttggaagttaaatagctcaatttccattgaataagtttttaaagttatgaaataactgtctcactgaaaaataaaaaacatgaggtccaaatggtttaacaggaaaattctactacatttatggagtccaaataatcctaatgctaaataaattgttttagaacgtagaaaagaaggaaaacttccaaattctttattttccaaatggcttggtattgtaaatgctgatttagttgtctgtctccagttgttgaagggctgaagtgaaataaagtaaaacatcttaaaacactttttagttcttagaccctcttttttaaagtagctttattgatatagactgcacgtatttaaagtatacaatttgttcagttttgacatacacacatcatcaccataattcagttaatgaacatatccatcactctcaaaagtttcctcatcccccttaattctgccttcttgctctcttcttgccggtcaaccacttatctggtttctgtcactgtagaataattagcatgttctaggacttttaataaatgttataatacagtgtgtattcttttgtatctcacttcttttacacagcataattattttatatcggtttttatgaagcaagtataaaacaaatatttaacataaaaattaaaggtagcacaaagaaaattacagatgaatattatgtataaaaattatgtaaaagttctaaataaaatactaccaaacagaacagaatccagcactctattacaaaactattagctcatcaccaagatgtataccaggaatgcaaagatggtttaacattagaatcatcaatgtaattcaccatattaattaacctaaggagaacagtcatatatttacttttatatatgctgaaaaagcctttgacaagattcaacaccaatatatagtaaaaactcttaagaaattatattgtaatcaatacttctttttttttttttgagatggagtctcaccctgtcgcccaggctgaagtacagtagcatgacctcagctcactgcaacctccacctcccaggttcaagccattctcctgcctcagcctcccaagtcgctgggattacaggcgcccaccaccacacctggctaatttttgtatttttagtagagatgcggtttcaccatcttggccaggctggtctcaaagtcctgacctcaggtgatctgcccacctcggcctcccaaaatgctgggattacagatgtgagccaccatgcctggccaatcaatacttcttaatgatggtattctctctctctctctctgtctctgtctctcacgcacacatacacacacacgcgcgcacgcacgcacacacacacacacacacgcagagagagagagagagagagagagagagagagagagactttattcctaaatcctgtattttatctaataggaaaatactagaggcatttttactaagattgagaaaaatatagagatactcaccaactccacttgtatttaacattgtactgggggcttagccaatgcagttagataaatcaattagaggcacaagatttggaaaataaaaagtaatattgtccctacttgcaggtgatatggtagtgtgtctggaatactgcagaaaatcaataatgaaactaactaaacagaaaaggaattttataagaatatgcaaaaatcagtagtcttcatatacacaacaagtttgaatatataatgaagggtaaaatcccatttacagcaacaagcaaaagagaacatatttaggaatttaaaaactatgtaaaacctaggtgaagaaatctttaaaacacttctgaataacaaaaatagccttaaacaaatgaaatcttttgttctaggacaggacaacaacatcataaaagtgcctaagttaatatatatatatatatatatatatatatatatatatatatatatatatatttaagttaatacatatacctaagttaatatataaatttaatgcaatctcaatataaatatcaacagagttctggcactagacaagttgattctaaagttcatatagaaaaataaacatataagaataggaaaacagaagagctacaaagagaaagtagacttccagatattgtaacatgttgcaaagcttctatcatgataatattgtggtatagaccaatggtatagaatggaaagtcaataattagtctcctaaacacatgaagaatttagtgtatgataaaggtagttctgaaattattagggcagagatggactctttaataaatagtgctgggacaacttgttagccacttgaaaaaacaaaattatatctatactttatatcagacacaggaataaactccaaatgaaccagaaatctaattttttttaaattacctactagaagaatacatagatgagttttctgtaacctggatgtggagaagggcaataaaagagggggaaaaattggctacattgaaaagcaaattcttgattacaaaaatgaaaaacaccataagcaaatttaaaagatagatgagaaaccaggaaaaaaatctgcaaaatacattttaaagacctactatccctagtctaaattgagagaaaaaaatactaaaatttggttaaaaaggcagaatacatgagcagatacaattttttaaaaagattcaaaaaccatccttaaatatgtgaagaaaatattcaatttcacctaaacaggaagtgtaaatttaaagctgcactgaaataccgtttctcacctatcagctctgcactaattagaaagcttcacaagaagccccattggtgaggctgtgaggaatgcaaacttgtaaaacctcctttgagggagaagttggcaatccagcagactacacatgcatttgccctttgacccagccattccacttgtagaaatattccctaaagatacattttcttttctttctttcctttttttttgagacagggtcttgcttgttgcccaggctgaagtgcagtagtgtgatcttggctcactgcagctcaaactcccaggctcaattgatcccaccttggcctctggagtagctgggaccacaagtgcatgccaccacgccttactaatttaaaaattttttttatagagacggagtctcaccatgttgcccaggctggtcttgaactcctggactcaagcaatcctgtctctgcctcccaaattgctgggatgacaggtgtgagccaccgtgcccggccttacgttttcaacagtagggaaatatgaatgcacaaagttatttgttgcagcattatttgtaattgtaaaatatcagggaataccttaaatgtccatacaggaaatttgttggtaaatatctacacaatggagtactgtacagctgtaaagaagaatgaggaaaatctttgcaaacgggtgtagagtgatttctaacatgaatggaaagcgtacatacagtgtgctattttttatgtaagaaagaagggaaaatatgagactctaatgtctgcttattttgcaaaaagaaaaacaggaaagataaatcagaaattattgaaattgataacccacaggaagtagatggcaaaggatggagagggaagaacacttctctgtggggaaaaacagtcttttatgtagttttaacttttagaactatgtaaatgttttatatattcaaaaatcaaatccacaagaacagtacaaacacaaactaatctaattcaaatgatgaatgtaatcaccctgaaggtgaggtgggactgaccaatcaagtaacttttgaatatagtactttaattatgtacccttaatctgaagaaagaaatgcaactgaattttgaactcttcttagtaggttttttttttttagtgacaggagtgtagcaatttgaaattacttcctatagtttcagattgaataaatgaataaatatatgatggttttttctatgaattttaagatagatggatagatcaatggatgtatagctgtagatacagaaatagatagaagtgtttatatttcctagatctgtctactaaaagggcctaggagcaatgatatgcaagtagcagatcatatctaatggccaggtcttagattttaaagatttttcctcattaaaataaatgaaggctgtttgaggaaatggtgattctatggctgaagcaggaaaagtaaatgaagaccatgaatgttgtgccaggtaataagaaagtgcctgatgggaacactttaaaggacagaggaaccaatggattaaagaagaaaacaagagacattagagtatatcttgagacaatgaaaacgaaaacacaacatgccaaaactcatggaatacagtgaaagcagtactagaaaggaaatttatagctacaaatgcttacattaaaaaagaaagatctgaaatcaacaatttaacttcacacttaaaggaacagtaaaaagaacaaaccaaacccaaagctacagaaacaaggaaataataaatattagggcagagataaacaaaacagggactagaaaagcagtagagaaattgacaaaacagaattgattctttgaaatgataaaaaaattgataaaactttagccagatggactaagaaaaaataagacaaattactaaaatcagaagtgaacaaggggacattataactgatttacagaagtaaaaagatttataagagaatattgtgagcaaatgtatgccaacaaatttgataacataaatgaaatggataaattcctcaaaacacataaccaccaagacagaatcatgaagaaacagaaaatctgaacagacctataactagtaaggagattgagttagtaatcaggtatcacccaacaaagaaaagctcagggccagatggcctcactggtcatttctaaccaatatttaaagaagaattaagtccaattttcctcaagctcttccaattaatgatatatttgataaagggttaatacccaggatatataaagaactcctcagcactttgggaggctgccgggacgggagaatttcttgagcctaggagttggagaccagcctaggcaacatggtgaaaccctggctctacaaaaaatttaaaaatttgccaggtgtgatggtactttgctgtggtcccagctactccgtaggctgaggtgggaggaccacttgagcccgggaggtcgaggcagccgtgagctgttgcactccagcctgggtgacagagtgaaaccctgtttcaaaaaacaaaacaaaacaaaacaaaacaaaacaaaacaaaaactcatacagctcaacaaataacccatttagaaaatagagaaaggactcgaatagacacttcaccaaagaagatatacaaatggccaataagcaaatgaaaagatgcctattatcactaatcattagagaaaggcaaatcaaaaccaggagataagacctcacacctgttagaatgcctgttataaaacaaaacaacaaccagaaaataacaagtgttgctgaggatgtggagaaattaggatgtggaaaaatgggaagccctgtgcattatttatagcaatgtgaaatggtgcaaccactgtggagaacagtgtggtggttccttaaaaattaaacataaattaccatatgattcagcaattctcaaaaagatatttgtacacccatgttcataacagcattattcacaatagccaaaaggtggaagcaaccctaacgtccttgaatggataagaaaatgtggtatgtatctacagttagatattattcagccttaaaaaggaaggagcggccaggcgcggtggctcacacttgtaatcccagccctttgggaggctgagacaggcagatcacaaggtcacaggttcaagaccagcctggccaacatggtgaaaccccgtctctactaaaaatacaaaacagaaaaattagctgggcttgatggcacgcacctgtaatcccagctactcaggaggctcgggcaggagaatcacttgaacccgggaggcagaggttgcagtgagctgagattgcgccactgcaccccagcctgggcaacagagcaagactccatctcaaaaaatattaataataataaaggaaggagcctggcatggtgactcatacctgtaatcccagctactccggaggcagaggtgggaggatcattagagctcaggagattgaggctgcagcgagctctgcacacaggaaattctgacacatgtctcacaacatagataaagcttgagaacactgtgctgagtgaaataagccagtcccgaaaaggcaaatactgtatgattccacttacagtgtgaatacattatgattcccatactgtatgagtctgctgatgacaaactattgtttttttgataatctggaagtgtctctatttcttgtggcattttaaataacagctgtattgtttttaaattattatttgtttatttttttgagacagggtcttgctctgttgcccaggttagagtgcagtggtgcaatcacagctcactgcagcctcgacttcctggttgagcagtcctcccacctcagcttcccaagtagctgggacaacaggcatgcaccatcattcctggctaatcttttgtattttttgtagagatggggtttcaccatattgcccaggctggtctccaactcctgggctcaagcgatccccccgcctcagccttccaaagggctgggattacaggcatgagctactgtgtctggcctgaatgacaggtctattgaaatacattacacatataaaattcacccattaaactgtacaatccaatggctttgagtatattcacagttatgcaaccatcaccgcaatcaatgttggaacattttcatcagcccacagagaaatttgcataccccttgccatcatccccaaatcctctcatctttcccaaccctaggcaatcagtagtctacactgtatccatggatatgtctattcttatacatttcatataaatggaatcatacactagttcatcttttgtggctggattctttcacttaacataatggtttcaaggctcgtcattactgtagcatttatcagtactatatttttttgtgtggccaaataacattttgttgaatggatatacacattttatttatccattcatcacttgatggacatttgagtggtttctgaatttggctattgtgaataatgctcctgtgaacaatttgtgtacaagtatttattttgagtacccatttttcactctttcgcatatatagctaggagtgaaattgctgggttacatggtgatatggtttgcctgtgtccccattgaaatctcatcttgaactgtggctcccataatccccatgtgtcatgggagggacctcgtgggaggtaattgaatcatgggtttttcccatgctgttcttgtgagagtgaataagtctcacgagagctgatggttttataaaaggcagttcccctgcacacactttcttgcctgccaccatataagatgtgcctttgcccctcctttgccttctgccatgattgtgaggcctccccagccatgtggaactgagtccattaaacctctttttctttataaattacccactctcaggtgtttcttcatagcagtatgaaaatggactagaacacgtggtgactatgtttcgttttttgaggtactgcttgactgttttccaaagtggctgtgccattttagagtcctaccagcagtgtatgagggttctgatttccccacattgttgccaacacttatctgttgcttttattatagctactttttaaaaataacagctttattgagatataattcatataccatgaaattcacctttaaaaacctagtgtacaattcactgcccttgatttgtgaaagatattttttctgggaaaagaattctgggttaatttctatcagcacatcgaagatatcattccactgtcttttgattttcatttttgctaaagagaaatcaattttttgtccatatggtacactgatatatttgggtgtggatttctttttatctctgcttggaattttttggctttctcaaatctgaaggttagtgtctttaattagtcctggaaaagtcccagctgttatcttttcaaatattaattcttccctattttctcttctttctggaactctggctagatttatgttagactttctactctgtcttccatgtctcctaacttctcatattttccatctgttttctctatctctctgtgtgtgcatctattaagtcaaaaactatgaagggtctgagattttaccctacatttatagctatatttatctttagccacttttctgaagttctaattatctattgttatgactgattttctttgggttgtattggtatattatcaagttgtctacatataatgataatctcatctcttctagtatttcctttttcgaatatttttgcattggcaagagcatccaatatgggagtgaaaatgagagaacaatattgtttttgctgttgtttttaatggattcacccctagtgtaaaatatatggtatttgttggttctagattttaaacacttgtaattttgtgttttaatgtgtttgttagacatggtttgagttttattaggtgccttttcaaaaatgcattgataatacatactgtgtgattctatatatatgaatcaagaagtttaagaaaccatgaacgaagagaacatatgacataaaattctgtcaaaaatctctctttgtctagaaattgtgtttgatgtttaattttatcagagaacagaaagttgcttgccccagtgccccagttaaggtaaagctgaggttcataaatacctcaacttaaaaaaatacaaaaagtagattttttgatcgttcttagttaggctcaccacctttgccccagggaaagtaactcctcccctttgaacagtcactgagtgaggcttacagagcgacgctctgtttttcaggaaccaccccctaaaatctccacttttagcagaagactggaaacagaaacatctaaatgttacttggcactgaatgtcttggagtagtctttttggcagtctatcccttgatagactgaaatagccatctttgacaacaaaatgaataaaaagtaaggtttgacctagtcttaattttgatagatccccaaccagtaactttagtgtcacttatttcaaagaaaaggcactctttttttctgctgtgtttttctccatcccatgtctctctctctctctcttttttttttaaaggtttattgtgtttacttttattctttttttatttttgagacagggtctctgttgcccaggctggagtgcagtggggtgatcatggctcactgaaacctcgacctcccgggctcaaatgatccttcccacctcagcctcctgagtaactgggactacaggcatgtgccacctcactcagctaatttttgtgtttttttgtagagacaggtcgtactttgttgcccaggctgctctgcagctcctgggctcaagcgatcctcccgctttggcttcccaaagtgctagtattacaagtgtgagccgccgtgcccagcctatttgaaaaattcttaatagccagttttaaaggtaatgcttgaagcttacatttcctgtgactttttttttttttttttttaaacacagggtctcactgtcaccccagctggagcagtggcacagaattgctcactgcagcctcgaactcctgggctcaagggatactcccacctcagcctccctgagtagttgggactgtaggtgtgtgccaccatgcctggctaaagatgggatctccctgtgttgcccaggctagtctcaaactcctgggctcaagccatccccctgcctcagcctcccaaagtgctgggattataggcgtgagccaccgctcctggcctgcttatttatattcttttgtaatggcatgataacttctttcatatatgtaggagaaaattttaatcattttccagattgaacttgtgattcttgtggtcattctaattcataggtttatttttttagtttctggttgctcattgcacccagaaattgttcctttttttaatattgtgaaacttcactagcctcaatttatttgttttcagttaatttttctcctttatcactggtctttgttattgtggatgaacaattttttttaagagatggggtctcacagtgttgcccaggctatagtgcagtggctgtttacaggtgtgatcatagtgcactacagccctgaactcctgggctcatgcaatcctcctgcctcagcctcctgagtagctgagactacaggcatgttggtgaacaattttctttttgtgtccaacaattgtatcgatattttgatggagtatgtacagaagagacacccttatggttcttagtactcaccaacttcctgaaagcattcccactgaggattttgagtaagaaaattatgtactcattaccatacttcagaatatgattctggctggagggtgctacctcgtgaggaataaccaaagagcagtgcattttaaaagcaggaagaggtcccctggagttaaggttgactgcatgctagctgtgaatccatagtgtaatcactacagttataaaatagttaatcaaacaattgtactcctgggatggctaagtagacatataaaaccatgctgtggagtaatgtaggaaatctcttattaaaatatcatggctagttttgatccaaaaataagtaagttatggaaggaatgtgggaaaagggtaagtaatgatgccatagaccactttgttctgcttagtgtcattaagactgaagatctgtgtacctctgcctccttgtcagtagtctactttgttgatgttgaaattcttagagggcaatagtctgacttcactctttatcacttcgtatttattcatgtgggaaagactcccacattgtacaggaccttgaagaggggacgcctcaacaaaagatcaaggcttttattttttatttatttatttattttttgagacagagtctagctctgtcaccaggctggagtgcagtggcacaatctcggttcactgcaacctctgcctcccgggttcaagcaattatcctgcctcagcttcccaagtaactgggattacaggcacatgccaccatgcccagctaattttgtatttttagtagagacagggattcaccatattggccaggttggtcttgatctcctgacctcatgatccgcccacctcggccttccaaagtgctgggattacaggcgtgagccaccgtgcccagccaagatcaatacttttaaactggattccaaatggtgaagtgccctaggaaatgcagagattaaggtcttaaaatattctccattaaaaagaatcagggaggctgggcgcggtggctcacacctgcaatcccagcactttgggaggcggaggcaggaggatcccttgagcacaggagttcgaggccagcctgggaaacatggtgaaaccccatctctaccaaaaatacaaaaaaattagtggggcatggtggtgtgcacctgtggtccagctgtgtgggagggtgaggtgggaggaacacttgagctggggaggcggaggctgcagtgagtcaccactgcactccagcctgggcaacaaagtgagaccctgtctcaaaaaagaaaaagaaaacaagaattagggatgcttgacgaaatggccgattccaaatctggtgcaaaaaaatgcataaggtatgcctggaacatcttttgagaggaaagaagctctcaatgactcataaggttaagtcataaggactgaagagcccgcctgaaaagactcccactggccaaacatgaatcaatttgagaatcaataaggatgatcactgtattggattgaaacacacctaatatgtttaatccatgagttcataatgatactgaaaaaaaattcatcactatttgaaggtggtgaaagaatgaatatcattttttatttattattgttaatgtatgtaagggatacaagtgtagacttcttttttgttgttttttgaaacagggtcttgctctgttgcccaggctggagtgcagtggcacaatctcagctcactgcaatatctgcctcctaggctcaagcagtcctcccacctcagcctcctgagtagcagggaccacaggcccgcaccaccatgccaggctaatttttttatagttctttagagacagggttttgccatgttgcccagcctggtctcaaactcctgggctcaagcgatccgctcacctcagcctcctaaagtgctgggtctatgggcatgagccactgctgccagccacgtgaatatactgtatagtagtgaagtatgggcttttagtgtactgcatcattattttgaaacttacgataaaagtcttacagctggctacgcatggctcacacctgtaatcctagcactttggcaggctgaggtgggagaatgacttgagctcaggagttcgagaccagcctagtcaacatggtgagaccctgtctttaccaaacatttaaaaattagctgggttgtggtagtgtacacctgtagtcccagataactcaggaagctgaggtgggaggatcacttgagcccaagaggtcgaggctgcagtgagctgtgattgagccagtgtactccagcctgggcaacagatcaagaccctgtctcagaaagaaaacaaacaaacaaaaagtattcctgctaatgagtgaaagaagtaataacagaatcgaaatgtcaccattttggaggtggacttccaaaatggtggagtaaggacctcagggtgtatgtatagctgaaacaatattggatgagttgataattgttgaatctgggtgataggtatgtagggattcattccttccatctacttttttgggggtaataattaagatataattcacatgccagtgtgaattattcaatgtttattaaataactagctatattacctaaagcatgttaaagagggaaaagaagcagaaataattccttctggagaaagtgggacaaaagctgtattatgatcatgcttataaacatgaagatttctcaattggatgtaacttagtttcttctaaattctgattttcactgttatctaaagtcaagatggttgatagatatgggttaatgagtggaacacggcttatgcgaaacttcatatttctagaaatatcatctagtgttaaccctgcctcctaagatatatgctataaaataaaaatagatgtctagtaaaggtagggaaaagggtttatggggttataactatcagctaaagtgaggatttttttaactatgcatggattacagctaggatcttcctttagccccagtaattttaaggtggtttaagctgtttgttatcctgggctatagctcagcgttaccacagcttgttacacagagatataaatgtgcttggtaaacgtattctttcaggttgaaactagatgattatgaagcatagtatcttgctggtaaacctttgctctcattggtggtggtgttcctcctttccccagttctgcccttgtgcagaattcagttattcatttgttctttgggctttccgtgtgctttgatcatttcctcccacctcgctcccttccagctttcatttatccttccaggccaggtcccatttttctaaaagccctttcctaataatcccctccctaatgtcttttgtacttattttagcattgtggaggaagagagggggaacctggttattctgttattcaagtgagccttcagttagttgaagattatatatttcaagtgtcactagttgtaaatgtcaaaacagtctattgaccaaaaaaaaaaaaaaaaaaaaaaaaaagtcctattactctgggcacagttggaacaatgcctgtttgaatcaagtccttcctcccctcaaaaaacattgtgattaatgcaaagtacctaactccactgatttctttttccctcactttttaggattatggctgctgttcctcaaaataatctacaggagcaactagaacgtcactcagccagaacacttaataataaattaagtctttcaaaaccaaaattttcgtaagtgttttgactggtttgctgtcacataggcactaacttaccacattgtacacatgagatatcttctctttaaactcccccattgtacagatgaggaaatgaagctgagagattcattgattttcccactttgccaattaatggtagagtatgttttagcagcaccaggtgagattgtgtctcatctttgcatggttcctggcacataatatttgctcaataaagatttgttgagtaaatgaataattgatcttgtaaatttgggcaaataagtgttttttaagttttggggggtttttttgtttgttttgttttgttttgttttttcttttgagacggagtctcgctctgtcgcacaggctggagtgcagtggcgcgatcttggctcactgcaagctccgcctcctgggttcacgccattctcctgcctcagcctcccgagtagctgggactacaggcacctgccaccacgcctggctaatttttttttgtattttttagagacggtttcaccttgttagccaggatggtctcgatctcctgacctcatgatccacctgcctcggcctcccaaagtgctgggattacatgcatgagccaccgtgcccagcctttttttttttttcttttttgagacggagtttcgctcttcttgcccaggctggagtgccatggcacaatcttagctcaccgcaacctccgtcttccgggttcaagtgattctcctgcctcagcctcccaagtagctgggattacaggcatgcaccaccatgcctggctaattttgtatttttagtagagacaggatttgtccatgttgggcagactggtctcaaactcctgacctcaagtgatccgcccaccttggcctcccaaagtgctgggattacaggcgtgagccaccacgcccggccaattattttaatataattttatatactttcgaagaacagtttataaggaaactacagctctccagttctgcctctcctctaagctatactccagactccttctaatgatatctaataataatttatattataagtgatgcttttaccaggttgtagactttgttctgggtgcctggctttgaagtcaccactgactttgagatcattaaatccagcagatagccacgattcctgcgtcttttacttgtcctgcagattttaacagagttagcagtttttaactctttttcccctttaagttcttatcagagtagcaaaaagtagccatatttgaatctcttccgtttttcttttttctttttttttttttgagacagtctcgctctgtcacccaggctggagtgcggcagtatagtctcggctcactgtaacctccacctcctgggttcaagctattctcctgcctcagccttctgactagctagggcttcaggcatacaccactatgcccggctaattttttgtgtttttattagaggtggggtttcaccatgttggccaggctggtctcgaactcctgacctcaagcattccacctgcctcggcctcccaaagtgctgggattacaggcatgagccactgcacccggcctcttccctttttcatttatgctgtcaccccgctctggagatgctattaactaaggactactagcctgagaaataaagtagtgggaatgacctctcaaagccaaataattagcctctgaatgggaaggaccagagaacgaatacaatttaagttacctgataaatttaaaatcgagagagatggattctttgctcagttgggatacaattaatgtaacctgtgtgaattagtttaaaaaattagttttgtagagttggggggtttcttaaaatggatccatctaatctagtttttccattatttttcagaggtttcacttttaaaaagaaaacatcttcagataacaatgtatctgtaactaatgtgtcagtagcaaaaacacctgtattaagaaataaagatgttaatgttaccgaagacttttccttcagtgaacctctacccaacaccacaaatcagcaaagggtcaaggacttctttaaaaatgctccagcaggacaggaaacacagagaggtggatcaaaatcattattgccagatttcttgcagactccgaaggaagttgtatgcactacccaaaacacaccaactgtaaagaaatcccgggatactgctctcaagaaattagaatttagttcttcaccagattctttaagtaccatcaatgattgggatgatatggatgactttgatacttctgagacttcaaaatcatttgttacaccaccccaaagtcactttgtaagagtaagcactgctcagaaatcaaaaaagggtaagagaaacttttttaaagcacagctttatacaacaaacacagtaaagactgatttgcctccaccctcctctgaaagcgagcaaatagatttgactgaggaacagaaggatgactcagaatggttaagcagcgatgtgatttgcatcgatgatggccccattgctgaagtgcatataaatgaagatgctcaggaaagtgactctctgaaaactcatttggaagatgaaagaggtaacaattattttatcttcattttagtatgttcattgtacttttttattcaaagctagccattgggaatagtcatgaatatatagagcttttgtccttaaggttgttagggtctttagtggtgctttttgaataatctgttggccacatttttgaggcaggacgtactgatgaaatggaaggttttagtctgctaatatagtttccaggatagctctgtgattttatacatgaagaaaatacaggagtttccccttgtccacagctttgcattctctgaggtttcagttacccgcagccggctgaggtctgaaaatattgcatcacttctcttgcgctttgggaccattattaagaaaacacaagccctgcaataccgcgacagtcaatctgataactgagaccactactaagtgattaacagcaacccaggtggacagatcaggtcggggcaagattttatcacactatactcaaaacagcttgaaactgaacacttatgaattaatttatttctgggattttccatttacatcacaatgcctacatcattcacctctcttcatctcatcatataggcattttttatcatcttatatctttacaaaggaagggtgagtagagtaagatattttgagcaagggagaccacagtcaaataacttttattgcagaatattgttataattgtgctatttcattagttgttcaccttttgctgtgcttaattaataaattaaactctatcataggtatgtatgtataggaaaacacatagtacttatcgggtttgatactatccgagatttcaggcatccaccggggtcttgtcacatatttcctgaagataagggggttgctgccgtaagatccatagaggttaaaatggtggttagtggtaaattggaaaatgaaactaagcctttctactgtaattcctttatggcttgttgccacctaatattgatgtataatgtgctctaattgcactattaaagtattataaattacattcaaagtttttcctggctagatcttgtaattatttaatgtccaaaattgagtaactgagattacccacatggggaagtaactcaccttatgaagcagttgcaaatatgagagtaaaatttttaaacccctgaatcccattaaggttactctagggtgagagagcactgaaaagtgattgacgataagcaaaactatagtctcatcaatgatgcctctgtttctgaagggaaaatttgttaaaagatagacagcaacaatttgggttgtgttttcccacatagtccaaaagagagacttaaataactgggaaactttgtgttaaagatgatttgtacaagcagccgtgtttgtgttattatcagacttatctgttgcactttacccttatttaaatatgagtgaaaagttaaaaactagaaacgtcaatagcaaatacgtgtttcgtaattaaccagagacagacatgaaaatccctaagcaaatcttcggcctcagtcgagcattcactggacttaatccacttgactcaatagtaatcatttatgaataaataagccagcattagcatgtaaagggagaggatccatacaaagtggtgtgattgtttgtgacttgccagaagcactcattcttaatcgctcatgccctgttctttctgtctcattagtggttaacaaatctatgtttatcaactgttttactgtagataatagcgaaaagaagaagaatttggaagaagctgaattacattcaactgagaaagttccatgtattgaatttgatgatgatgattatgatacggattttgttccaccttctccagaagaaattatttctgcttcttcttcctcttcaaaatgccttaggtaaactagctaaataattagcattattatttgtttctgggatactttaaattgtttaatttagtttataatatcatttctatataaaagtattttgtgctttctacaattattttacattcaagtgaaagcctcaaaaaaaaaccctgtttatacatttaattggttgcattctaaagatgaagtcccattatgattaattacatgaaacttcaaacaattttaggtagctgatttttttttttttttgagacagtctcgctctgtcacccaggctggagtgaagtggtatgatcttggctcactgcagcctccacctcccgggttcaagtgattcttgtgcctcagcctcccaggtagctggaactacaggtgcacaccaccatgcctggctaattttttgtattttcagtagagacgaggttttgccatgttgcccaggctagtcttgaacccctgagctcaggcaatccgcccgccttggcctcccaaagtgctaggattacaggcataagccaccttgcctggccttatatagttgattttgacataaggaatatatttctaaaaatattatatttccaaacctgacctgaaatgacacaaagctaacccattatatgggaagtgaattaggacattagtactttttaaaaaaatcctacaggatagaattggccattgtatttgttattcactcaattttagcaaattggtgacatgattattgttaattggtagtattacgagaaaaatagatactccacacgactcatcaacagcttaaattgctaagtgtcaatgttaccttcgtcctcatcccagtctcactctcagaccagttgagtggtagagtatagtatatactaaactgagcaaaagtttatatagagtctcaattctaaaccagcattctcatttaccaggtgaaacagctgaggcccagggaggagcaaggaattgcccaggttgatacaatgaatgacaaatggactcagatccagtgtagtgccttccctggtgtcatactgattccttgttgaatgcctggcttttttctttactcattaaaaatgtgtgttacgcaaataatataatcattttaacaaggattctaaataagaaggaaggagcactgctgggtgcggtggcatggtagtggcctgtagtcccatctactcaggaggctgaggcaggaggatcccttaagcccaggagttcaaggctgtagtatgctgtgattatgcctgtgagtaaccattgcactccagcctgggcaacatagcgagaccctcatctctaaaaaattaaaaagagagagagaaggaatactagtagtcccacaattctgactgttttctttatccatcttcagttttgatacatgtgtgtttgatttctgcattgttgtaatcaacatgtaattataattttatattctactttatttctcttagcattatttctaaatcattttccaattgctacatatttaattccttttaatggctacataatttatcaaattgtcatatcataaataaatttacctagagtcttagcaattaaaaaagcttgttttacaaagtatttccaaggtagactctctttgtacatttcccattgtaacttagtatacatatgtgtatatattataaaactgaaatagaattttcacaatattttttgtgcaatgcacagcttaaattctatgctacattttatttcagttttaaaaaatactggttgtaacctctgaatttcagaagtcaagtggtcagacagtatataacagagaagagagacctgtttttcaaactcctcttttccaaaacctctgtagctggccctcaagattctccatcttctggccacaatttacctttttcagctttatctccacttatgcccttgcaataacccagtggttttaatgagtcaaaccaacaatctagaaagcatatcattttctttaattataatgttattgtttaaaaaataatattaaaaagttacactgttttgatttagttagaaagttgcattccaaaattattctttaggaaaatacagttgattcccagatgtcaagcaaatagaaatgtcctttttaaaatctttctttcatagtctgacactttccccatacttgtcattcagtttgcttaaatcttatctccttggcaaagccttctaaagttccaaaaaatgttacctttctttggatttccacagtatcctctctttaacactcattcagtactaatttattttgttatttgtaaagtattttttctatgtaatcagactgaccaggtttatatgttaatatgtttttgtataatctgtgtggtgaggtaattatatatgcagacacacaaaaacacatgtacatatatttgcataataagagaagtccagaaaaagtgctttgaaatctcagaaaaaagagacattaataatcacttgctggagaagtaatgctttggctggggctagaagaacaggtgtgatttgggtacgaagagattggaatggcaggttttccaaattgagaggatcagtggcaaaatccccaaaataggcaatgcagggcttatatgaagaatgtaagtggtacagtatgactgaagatttgtgttactgaaaggacataatcggagataatgttgaaaagggctctttctggacaactttgaggaccagctaaagaagttttataattgaggaaatttaaaaaactacttctcttttctgttatatattgtctgatcagtggtagaaaaatattaagggtttcaaaattatacatttattgagtctagcctatagtatgattggcttaacattttttttatttgcagtacgttaaaggaccttgacacctctgacagaaaagaggatgttcttagcacatcaaaagatcttttgtcaaaacctgagaaaatgagtatgcaggagctgaatccagaaaccagcacagactgtgacggtacaagcaatattttagacataccatgtatttcaactacttacttttgaaaacaacgtaacacaaagattgtgttttgaacctgtggctgtatgttataaaatggcagatttgtagtttcttttcttctaatgtcataaccttgtttactggttagccagcatttgcctgaacaactcatgaactcatgctctcacaagggcgttcattccccattttgaaaatgctacttgttagaaatcatctctcatactgagccaagatctgcaactttaattctaggaggtttttaaatttttatttacaaatgagaacttccacaaaatcctgtgtttcagaaacacggaccacagagcgtaatctcatcataatagagtttccctccccctccttgactaaatattattaggtcttttaactctccttgctagaaattgctttcttgacctttcatcctccggttctcccttgtatatactctgagtctaggtctgggtcttgatgttcatttaaagctaaatacttgtttgcttgttttgtttctaattcattttttattttttattaaatatctagtgtaaataatcagatagcagtgcaagactttgataaacgacagtcccccttcccactcttggtgtctgctgctcagaggcaccttcagtctgaaaatatacatcctcttgtagacatttttctggcattatttctttttaccttctttttctctttttcactcttcctggaacttctatgatttgcatgttagacttccattaattatcttttctatttttcatctcttgattttctactttttaggatatttccttgattttatctttaactcttctgtggaatttttaaatttctatcaaggcaatttccgagagctcttctttgttctctggatatctctgtcgtgcattcgagtctgagggctgctgggcttttttagcgacgtctgcatgcatgtgcgggtcatgtgtgtagtgttctctgtgtgttgtttttgtttcctccagtttttttgtggtttattttggactcaatttattttagagatattcaggaggtgactgatgtgctgggcgctcttataaagtgccttacaatattaactaattcagtcatcaccataaactacctcaaactttaaggtagtttccttttttttttttttgagacggagtctcgctctgtcacccaggctggagtgcagtggcacaacctcagctcactgcagcctccgccttccaggatcaagtgattctcctgcctcagcctcctgattagctgggattacaggtgtgtaccaccatatctggctaattttttgtatttctaatagagacagggtttcaccattttagccaggatggtcttgatctcctgaccttgtgatccgcccacctcggccccccaaagtgctgggattacaggcgtgagccaccgcgcctggcccactttaaggtagtttctgttatccccatttaacagataatgaaactaaggtacaggagcgttaaatagttacacaccgtcatagaattagcctcagagctaggatctgaacacagcagtcttgaggcttttgagttttcattgataacaactgcattatactgtctctgtatcattaagtttcactaataaaatggttagctagaacaggggcaaggacagagttctacagcatgtcaatagaggcttccctcttggcttacaacagtccattcatcaccacttcttgttcagctagttacatatctgtcttcagaccatgtttctgttctttatccatggagacacaaaagacttgactatgtgactccaaaaagttagaggtgtgaggcagcaagaaggaatgggtgggacattgactctagagtcctacagacctgtaatagaaacctgtctcctcctactcttgactatgtgactatggcaaatagttaaacttctctggacttcagttttttcttctataaaatgaggagaatgatatctaccttgctgggtagttgtcaggattcaagataaagtgcctagtacactgcaggcctttcataaatgataactattgttatctgccagtctagtaatccttttaaaaaaggaaatacattaagacggatggtttgtttttatgaacttttgctaactctattattgtttcctcccccttagagctcacaaagcagctatttgataacaggctctagaattttgctttgaatttacatcaaatcaccagcctgtagtttttggcaatcactttcaaattttttgaaaattagaacaatgtttgtctgtcctcactttccatcagttctcttattcactagatgcctcacacacgtgtcagtgacaggggctctgagatcctgtttgcaggtttcctttgtactctgaggtataatctgtctagacaaggagtcttgggctagtctctgatagctaggtacccccttttatctccctctgagcctgtcttggctttcagttccatccgaccattgtgtattctctttccaatctgatgcttgttttccttgcagagaaaacagaagtaagataggaattcagcaattccattttacatctcatacctcacatttctctcagtcaccagaagtccaaatttcccaggccattcttgtgcagatgcccctcctcaccctgccatcttcactccctgttctgtcctcacttcctgtccttcctggcttgtaaaccatttaactgactgctctgtcagcaatgtccctgtagcctcatccgcttctctgatcattttcttccccttctttctctaattgttttctgaggatatgtactgtttcccctgcagcccacctaaactgttttttactctcacagactttaggcctgagaggtggcaaaggcatctgttgtccttgcttcctattgccattttttttcctttttttcatctttttttttttttctcgctctgtcacccaggctaaagtgcactggcgcaatctctgctcactgcaacctctgcctcccaggttcaagtgattctcctgcctcagcctcctgagtagctgggactacaggcatgcaccactatgcccagcttttttgtatttttattagagacagggtttcgccacgttgaccaggctggtgtcaaactcctgatctcaggtgatcctccagcctcagccttccaaagtgctgggattacaggcgtgagccaccatacccaggcgcagctgaggttttagatgaaggaaagggctggcacggtggctcacgcctgtaatcccagcactttgggagaccgaggtgagtggatcatttgaggtttaggagttcgagtccagcctgcccaatgtggcaaatccccatctctaataaaaatacaaaaaagccgagcgtggtagcgtgtgcttgtagtcccaggcactcaggaggctgaggcaggagaatcacttgaaccggggaaacggaggttgcagtaagccgacattgcaccactgcactccagcctggaagacagagcaagaatctgtctcaaaaaataaaataaaataaaacctctactgctttgaaattctatttattagttatggcttaatttttaaaatgggagtgggctggcaggattcagttgttcaaacatcatatcaggagttgctctgtctctcacttcccttctctctcctctcttctgtcccatctctccgggtcaaacctccatttctttctatgtgctttctacttttcctttgtatcaatcttatttgaaatctgtctttctttataaggtgacagaaatggccaccagaatcatattaagcttggaaaaagggaggtactttttcccagtcagccctaagtatttccagagttaattttcactgggctgccttgtgtcagatgcctactgagggagtgggaagggtaggtctaataggaaatcttggtaacagtatatgttaccattaaagggaagcctggattccaggcagatcaaaacaacaggtagggctcttgcctgtccaacgcttaacaatacactttgtgttggcacagtgagctttgcacatgaagttagttaaaaataaaatcatagttaactgataaacctttgttccagccaatgaccttgcttaccccaagaaatattatttattaaatattatgaaattaaatgaaaacagttatgagctcttatgataaagcgtagagacaacccaatttcaagttaattcacaggaagataataggacaatatatggttgtttatgatcttgtttttacactgcttcatattttacatatgtgactttcaaaatcttaagacttgactgggcacagtggctcacacctgtaatcctagcactttaggaggccaaggcgggaggatcacttgagcccaggagtttgagaccagcctgggcaacatggcaagaccctgtctctacaaaaaataattaattaaaaaaaaaaaaaagaagaagatgtgttgtgttgctgggcacagtggcataggcctgtagtctcacctacttggggaggctgaggcaggaggatctcttgagcccaagagtttgagggttcagtgagcagtgattgcaccactgcagtttaacctgggcaacagagccagaccccctttctttctttctttctttctttcttttttttgtgagacaaagtctcacttttgtcccccaggctggagtgcaatggcacgatctcagctcactgcaacctccacctcccaggttcaagcgattctcctgcctcagcctcccgagtagctgggattacagacacgcaccaccatgcccggctaatttttatattattagtaaagacggggtttcaccacattggccaggctggtctcgaactcctgacctcaggtgatctacccttcttggcctcccaaagtgttgggattacaggcgtgagccaccgtgcccagccccactttaaaaaaaaaaaaaaaaaagaaaaagaaatcaagatcttaagacttttttttttttttttagtgacagggtctcactgtgttgcccaggctggtcttgaactcctggacttaagcaatcctcctgccttggcctccccaaagggctgggattacagtcatgagccaccatgcctagccaagacttttttttttttccctcaaagaaaaatattaacaacataattattttatagctagacagataagtttacagcagcagcttattcatgtgatggagcacatctgtaaattaattgatactattcctgatgataaactgaaacttttggattgtgggaacgaactgcttcagcagcggaacataaggtatcttaattttcccccttctggaatatatctgattatatttctaccactctaagtgaaaaatggacagggcaaaatgttcaggctttctggcctggaaatggcataaggatgatcatcatgccactatgtttttgatttgtttacttttcaaaccactcctttaacattcgtattcatgtttttaagattgggaaaaaagcgaatatattttgctacaatttctatttggtatgaaaactacagatttgcttttgtggcctaccagagtaaactacttatatttaatacgttgttctcttttctctcttcagaaggaaacttctaacggaagtagattttaataaaagtgatgccagtcttcttggctcattgtggagatacaggcctgattcacttgatggccctatggagggtgattcctgccctacagggaattctatgaaggagttaaatttttcacaccttccctcaaattctgtttctcctggggactgtttactgactaccaccctaggaaagacaggattctctgccaccaggaagaatctttttgaaaggcctttattcaatacccatttacagaagtcctttgtaagtagcaactgggctgaaacaccaagactaggaaaaaaaaatgaaagctcttatttcccaggaaatgttctcacaagcactgctgtgaaagatcagaataaacatactgcttcaataaatgacttagaaagagaaacccaaccttcctatgatattgataattttgacatagatgactttgatgatgatgatgactgggaagacataatgcataatttagcagccagcaaatcttccacagctgcctatcaacccatcaaggaaggtcggccaattaaatcagtatcagaaagactttcctcagccaagacagactgtcttccagtgtcatctactgctcaaaatataaacttctcagagtcaattcagaattatactggtaagtttaaaataaattgaatgcttatatgaaaacaaaactgtcccaaaataggaattatataagaaaaaccatagcaaatcatcattgcctgaaaacattgttgctatgcaaatttctactgatgatatgaattacaaatcacaatttcaaaagcaagttgctcttttgtctctatagcagctgtagttttataaaatgtgtaattataacctattgtagtacggctctaaagtcattacaaatgtgatgtgcctttgaattaacattttttagttcctaaaacaaactcatgagggccaagtttttaatgattttgggatgggcaaaagcaaaaatggattcgcatgctaaaaatgtattttagaattctgtactgatgagaatcgattaatacaaagtagagaagcatgttttatgtgttaaaatgttaaaatatagggtagtctataaaggatatgaagtcaggagtgtcttaaatcagtcaaactacttctttgggtctaagggctcactgcatgccatgtgctatgttgggcgccgatcatttaaagatgaataacaaatactaagtagttcctgccctcctggagctcacagcttagtgagagagaagttttgagaggaatgaaattagccactgaaggctccagagaaaagccaaaaataattttaaaaccttacatcaaccctataaagttatcaaaagtattttttagctgaaataagtttataaagtacagccctccctatttttgccattgatgacttaataccacggaggtttttcttacagttacgctgctgacctttaaaacaacgattaatggatttatttttgtatcatgttagaatgtgtcatacttgatgtttgcaattatcttgagacagttgagtgttggggttagcgtaactgccagagctccgtgagtacctcttgttctctgtgctgaaccagagttgcgacagccaggctgcagagcaggggcacgtgtgagagatgttatgaaagaagagcctgaggaagctcagatgactccaaggtttcagacactgatgactgggaaaactgtgacaccagtaacacaaacaggggagtcaggaggcggagtcagatttggagaaaagctgagaagggctagtttaagtctagaggttaaagtgctggtaagtcattcaggtaccaatgtcttgcagacaacgggagctgtgtgcaggactggaacttaggagggtgtcagttgggtcttaagagaggtgtaggcatttgctgcacacgggtcatgtttaagatcataggactaggaaagctccaaaaaagaatgtctacagagcccagtcccaaatatctgaaagactccctcccctatttatggggcagatggaggtagtagagccaggaaagggaatttaaaatgagtagaaaaccatgattgtcttggtggtcatggttggaggaagggagaagaggaaggaaagaataaaagtagtggtaggtgctgtagaaaaagtcaaggaaatacttgatttgggactttggcaagtttttggtggctttgagacttgtagggaaggaaagccagtaaagagtttaagaactgtgctgcagggaaacgtgtgccagtgattctgcagggcaagggaaatgctaaagctgtactttcactgtattcatgtactgatttttcttaacgttgattattttcctagacaagtcagcacaaaatttagcatccagaaatctgaaacatgagcgtttccaaagtcttagttttcctcatacaaaggaaatgatgaagatttttcataaaaaatttggcctgcataattttagaactaatcagctagaggcgatcaatgctgcactgcttggtgaagactgttttatcctgatgccgactggtatgtatttttagaagtgaattggcaggaatccattggcagatgttaaatgaaagctctttaatagaaataaaaagaccacctacacagtatttctatcatttagggacctcttaaacctcctgtaccatagtgagaaagcatattactttatatcctttgttctggttgttgacatcatgaagtttatagccctgtaagattttcaactcgaagctcattgtgttgaactgatctagaatttttctttgggaatttttcttttttctagtctaagcagttttggaaatcaaacagaaaaatcgctgtcagagaccatgaccatttctggcagtttatttgcaacaatctggtgttgcatagtggttaaatcatatatgcatatatgcatagtggtccatcagctatggaccaaaggcctggacttaaagaacagctctgctgctcacagcagtgtggccacatgcaaggcactttactccctgggcccattttctcatgtgtgcaatggtgatagcagtaaagtacctggttcacagagtggcatgaggattaaatgaaaatcatttagcacgatattgtgttggccccactttaaagagtctaggacattcattgtgctgttaaagcttatgacagctgttcaatgatttatagtcattcacatgagaatattaaatcaacagggcagagcgcaaggagaatttgcagtttcagtacctatgtgtagtcctccctctgtctatcacctgacttgtgacctttagcaagttagctagtgctgtcattattgtataatgttgactgggcatctgaactttttcatcctggtttttagatttagatagccttggcttaataatcagcatttcaatttttattaatttattaatcactctgtgccttcctttcaaccctattttggtgtttcagaactctaacgctggaaaaaaccttggcaatgatctaatccattgattttttttttccagggcttcccattgtcctttagggtttcaagagggcatttttaaggtccttccaccccaatttcaaccacttgtgagagagagatatatataatatataattatatataatatgtatattgtattgtatataatatgtctattatatataattataatatatagtgtgtgtgtaaatattccaaataaggtttattttatttttatttcttattatttttgagacagggtctcttgatctgtcacccatgctggaatacagtggtgctatcacagctcactgcagcttcaactgggttccaacaatcccccccaccttagcctcccaagaagctggggctacaggcatgtgccaccacacctggctaatttttaaattttttgtagagatgggatctcactgtgttgcccaagttgatctcaaattccctgggctcaagcagtccacctgcctcaggctcccaaagtgatgggatttataaataataaaagtaaataaacattatatagaaagtaattattttaatcctagtgtcatttttagagactcttctactactagaaataaaaactttactgtattccactacattttaagtttcctgccctaattcttgcctttgctattatatatgtctatataagatgtcctaggccgggcgcagtggcttgtgcctataatcccagcactttgggaggctgaggcaggtggattacctgaggtcaggagttcaagaccagcctggccaatgtctctactaaaaatacaaaaattagcaggatgtggtggtgcatgcctatagtcctagctactggggagggtaaggcatgacaattgcttgaacctgggaggtggagattgtagtgagctcagatggcaccactgcactccagcctgggcaacagaatgagactctgtctcaaagacaaaaacaaaaacaaaaaaaacactttttttttaaagatcatttttacacattatttaaattgcctaaatataatagtttgagtcatttgagtatggcaaattgttggcaccagggacaatatgccttggtgtcctattaatgatatgatttcttttgtaacttttacattcatgctctgaagacagaacctgacagatattttttcattgttctctttcaggaggtggtaagagtttgtgttaccagctccctgcctgtgtttctcctggggtcactgttgtcatttctcccttgagatcacttatcgtagatcaagtccaaaagctgacttccttggatgtaagttataaaaatactaataaaaacacgccttagaaacaattaaatttcagtcctctggataacctttttattaaatagttcgtgatttgtaaaaaataaagcacagcagttaaatttgcagttgaacagaagtctgaaaatttgatacagataacctctagttcaatctgtttttattctacaagaatgtatcttagtaagaacttttaaccaatgctattttttgctgatgtaaatttttttaacgaatagaaaatcatttcttttttcagtactgccaggtcggcatagttctctttcccttatatcttaaagtgcatacacacatgcatgcctgcacacatatatctttttttctcatggctgagtttaaggaagtaaatgaatgcattctacttaactcttcacaatgtagttgggggtggtggctcatgcctgtaatcccagtgacttggaaggcaaaggtgggaggattgcttgaggccaagaattcaagaccagcctgggcaacacagcaagactttctctacagaaaaataaaataagctggacatggtggtgaaaacctgtggtcccagctgcttaggaagctgagggaagagggtcgctagagcccaggagtttgaggctgcagtgggtcatgatcatgccactacaatctagccttggtgaaagcgagaccccgactcaatcacattgtgattaaaaagaactgttttaagagttatgagtcaccacccctcaataagaccactagtttggttttcttccaaagaatgtcttagtgcagtggtggtagccattgttcaaccatttgtcatattatggccccttcattgtcattaatctttaaaaccctgaaatacatttatctaaaaaaaagatgccatacagtaggactggaatatcttgtataccaaattcatatttatcttatttacaaagatgaaaaataaagcaagaaaaggaaataaataatgagaagaccattttgtgttatgcttttttttgttttgttttgttttgttttaagacagtcttgttctgttgcccaggctggagtgcggtggtgcaaccttggctcactgcaacctctgcctcccaagctccagcaattttcctgccttagcctcctgagtagctggaattacaggcacctgccaccacgccaggctaatttttgtattttcagtagagatggggtttctccgtgttggccatgctagtcttgaactcctgaccccaagtgatccacctgcctcagcctcccaaaatgctgaaattacaggcgtgagccaccacgccctgcctgagttatgcttaataagggttttttaaaatgtatgtacttacatacttgttatgttgagatatgtatttcctttgataggtttgatatgtgactaataaaatatttataaaacctaaggacaaatgtaattttgtcaggttaatgtataaaattgaaattgtttactacttttatacttagattccagctacatatctgacaggtgataagactgactcagaagctacaaatatttacctccagttatcaaaaaaagacccaatcataaaacttctatatgtcactccagaaaaggtttgtatttatatcattattttaaaatatattaaagaccactagaatacatatatttttaagattttaacaaaattttgtatacgtagtgcaaagaatttttgtacaactttcatccagaaaccccaaatggtaacattttactataattgctttgtattctctctctgcatatattttcctgacacatttgattgaaaattgcagacatggtatccttttaagccctaagtacttcactgtacatttcctaaaaacaacgtattctctcatataacctcagtacaatgatcaaaattaggagatgtacattgatgcagtactattacttaatctgtaaaccttattctggtttcactagttgtcccaataatgtcctttatagcaaaagaaaatcccagatcatgcatgcattccgttgtgcttctctgtaatcttgtaaacagtttctctctcttaatatctttcgtgattttgaagtttttgaaggccagtcgttttcggaattgtccctcaatttgagtttatcttgcttcctcctgcttagattcctgttactccttgaatatcacagaaacagtgatatgttctcatgcccactgtcaggaggcacttgatgtcgattcgtcccattactgacaatgttagttaactgatcgcttggttatggtagtgtctgatagacttctccgctgtaaagttactcatttctttttggcctttgtaattagtagatatcctgttgtgggatgctttgagactatgtaaataccctgctagtgatcagaattttacccacaagttttagtatccattgatgattcttccccaaatcagttattactatgatagatataaaattattttttaaatgtagttggtgttttgccataaggaagagttttcctgttggttacactttttttttctttttttttttttgaggtagagtctcactctgtcacccaggtgggagtgctcggctcactgcaatctcggctcactgcaacctgggttcaagtgattctcctgcctcagcctcccaagtagctaggaatacaggtgtgtgccatgatacctggctaatttttgtatttttagtagagatggggtttcaccatcttggccaggctggtctcaaactcctgacctcaggcgatctgcccacctcggcctcccaaagtgctgggattacaagcgtgagccactgtgcccagcccacatatttattgatactagcatgaactcgacttcttaatttattcaatgagttacattcaattatcaagtattttgatgttctaattgtcctacatgtgaccagtgagacatctctctcaagctggcttctctgtccttttgacatgtcccggtcaagatgtgagtgctacatgtgctcgttgctactgagatgtcattgcttctaggccctgttatgaagagagctataaaatatataatttttcccccagccaacacgcatccatataacccagatatgtaaccctgttgccaatgtaaatgtatggtggccctcagatgtcttgaagcagacaaaagtttgagaaccactaacctgctaaataagctgtttgcttaatgttggtgaacattctaaaatttgatctgctattttctattacttctgctgttctcttcatagattgaaataagaaccaattttatatggaggtgtttttgtttttgtttttgttttttcgagaccgagtttcggtattgttaccaggctggagtgcagtggcacgatcttggctcactgcaacctccacctcccgagttcaagcgattctcctgcctcagccttcctgagtagctgggattacaggcatgcaccaccacgcccggctaattttgtatttttagtaaaggtggggtttcaccatgttggttaggctggtcacaaactcccgacctcggatgatccacccacctcggcttcccaaagtgctgggattacaggcgtgagccaccgcacccggccttatagaggttttaatacagcttaagttgtgatggaatttgaagaccacagaatcatgaggtgatgtgtttcagtgtttttacatgtctaatgtatttctggcctagatctgtgcaagtaacagactcatttctactctggagaatctctatgagaggaagctcttggcacgttttgttattgatgaagcacattgtgtcagtcaggtaaatactgttttttatatccggaaataccgataaatacatactaccaacaatatatgtatttactgaataaaaacccacactgagtgaacgagtctcctattttactgaagaataaggtagttcttaatacattgagcagtgttggctttttatagaaggaagctccaagtagtctgaaaagcagtatttttttttccaactagtggggacatgattttcgtcaagattacaaaagaatgaatatgcttcgccagaagtttccttctgttccggtgatggctcttacggccacagctaatcccagggtacagaaggacatcctgactcagctgaagattctcagacctcaggtgtaagttgttgcacgtcacgtatttgagaaccctggggcagtgactgccagagctgctacatgttagaatcacctgtggcgctttaacgccaccaccccacccccaccccacccccatgcccaagttgtaacccgatggcagctaaatcagaacgtttggggctgagagccagtatttttttaaaaatccccaagtgattacaatgtgcagcagagtttgggaaccagagtcctagggcttttcttcacttactgaaattaaaactccttttcagtacctactttagaagtagggataaattgcatgccatatctatcatccctggtatagtcccagtaataaattaatttttacttatctaattttggcttccatatatcctagagtatacttcttgaaatgaaagatgaccctgctttgtcatttccccctaaggtcccagttgaatccaggatgttgaaaatagtccagatactatgtcgaatagcttttttactttgttttcttctcaacaacaaaatgcttcttgttgccaccaaatccataattcttcagtaacaaaatctactataaaagaaatccccccccccttttttttttttttgagatggagtctcgctctgtcgcccaggctggagtgcagtggcctgatctcggctcactccgagttctgcctcccggggttcacgccattctcccaccttagcctcccgagtagctgggactgtaggcgcccgccaccacgccaggctaattttttttgtatttttagtagagacggggtgtcactgtcttagccaggagggtctcgatctcctgacctcgtgatccgcccgccttggcctcccaaagtgctgggattacaggcgtgagccaccgtgcccggccaatccccacatatttatctaggctgtactggattattttatacttctacctgagtttgtagagatatggattctttggtaggtttattcactcagcaaatatttatttaacaactgttgtgtgccgagtttaaagtatttttttcttctgatttattagtgtgcactttagtttcagatgtaaacattaacatggtatgcctgaaggagtaatgactgaattggatattgaggtgaatttttaaagcacggcttttgttcatttgaaaataaagacaagctggtgctataaatattataagcagtaagaatagcaacagtatctcttagagggttatgagaagaactgaaggttccttatgaaggatatgaatgggtcatgtgattaagatagctacaaaagcttttgcaggttaaactggcagcttctaaattatctgatctaaatcaaggaattcaagcattttgggtttcttccagcctttaagttgtttggttccagcctagaattattttattgctagtagcactgttatatagcacaaatgaccatactcaagtgcaaggattttagagtcctcagaattttgtgtgtgtgatcacaaagtttggaatggaatattgtaatttaatctcacttgcagaggagtatttgtattaaatttggggaaaaatattttgcgtctataattgatatgcattataatgctatatttaagatgtcgtattaggctgggtgcagtggctcatgcctgtaatcccagcactttgggaggccgaggcaggtggatcgcctaaggtcaggagttcgagaccagcctggccaacgtggcgataccccatctctactaaaaatacaaaaattagccaggcctactggcgtgcgcctgtaatcgctgctactcaggaggctgaggcaggagaattgcttgaacccaggaggcggaggttgcagtgagccaagatcacgccactgtactccagcctgggcaacagagtaaggccctgtctcaaaaacaaaaaacaaaaaacaaaaaaaaagatgtcatattatactttagattctaataaataacctatttgcaagtaagtacttctgtaagtactacattgatctataatttttttttttttttttttttggagacaggtcttaccatgttgccatgttacccaagctggtctcgaactcctgggcttaaacagtcctcccatctcagccttcctaagtgctgagattcttctgtcctcttacgccggatgcaatctactgttcttttagatcagttacatcaatggcaaatgcctatagttaaatgataaaaaaaatttcttttccttttgaatgactttttgtaagtataggatttgtgatttatgtttgagtaaacagtgtacatatttatttatttatttagaggcaggcaccttgaatctgttttcttagtactgtggggaagagatctgcctgggaaagcaaggttgtggatttccagtctccagcacttggtacataattggcactcagtaataatcaataaatgaaaaatgtgaaggaatttgggtaaatgtaaaaatgtaggcatgtctgttgactccttaatgtgtttggcacttctctgcatttggaagtaggaaattttaaggaatactttctgggactctgtttcctgatcttttctgccagtaggccctggtttggattaaatttgctcaactgctgctatgtcgtggccctggcgaagtcaggtattcctaaggttgaagccacagcccctgtgctgctctcctcccgccagtctgtaataatattcttcctctttgggaaatataaggcacacaaaaaaggctttattccatttccttagggccttaaaatatgaactggaagagagcaaagagacaggcacatagagttaactataatagaacaataataatagctaacacttacatatccagcctactcagtgtgccaggcactgttgtcattttaagtgtatttacctccttgtccacacaaaagcaaggtaggtactcctattttcctcattctacaggtgaggaaattgagacacaaagagattatataacttcatatgcctagcaagggttggagtgagaacttaaaacaccagatagctggtttcagaatcctttaaatactaggtcaaattgcagaaagaagaaagcagtgatttgagatgtaaattacagctgcaggaactgaagaagacaagataagctagaacccccagtaacagctgttacaaggaggggtcagatcaagttttgtaaaggcactgggcattgtaggaggagtagtttatttaaaagcataggttgggcatggtgactcacgcctgtaatcccagcactttgggaggccaaggtgggcggatcacctgaggtcacgagttcaagaccagactgaccaacaaggagaaaccccgtctctactaaaaatacaaaactagccgggcctggtggtgcatacctgtaatcccagctactggggaagctgaggcaggagaatcacttgaacccgggaggcggaggttgcagggagccgagattgcaccactgcaccccagcctgggcaacaagagcgagactgtctcaaaaaaaaaaaaaaaaaaaaaaaagataaaagcgtagacagcagccgagcgcagtggctcacagctgtaatcccagcactttgggaggccaagggagacggatcacctgaggtcaggagttgaagaccagcctggccaacatgttgaaaccccatctctactaaaaatataaaaattaaccaggtgtggtggtgggcgcctgtaataccagctacttgaaaggctgagacaggaaaattggttgtacctgggaggcggaggttgcagtgatccaagatcatacgactgcactccagcctgggtgatagagcgagactccatctgaaaaacaaacaaacaaaaaaaggcttaaacagctgtattgaaataaaatttacataccataaaattcacctaaagttgacacttcaatggccttttttttttttttttttttttagtttataaggttgtgcagccatcaccattatctaattttagaacatttttgtctctgttgaaagggagagtatacccattagcagtcaattcctactttctcactttccccattcttaggcaacccctcatctactttctgtctctgtaggtttgcgcctattctggacatttcatgtaaatggaatcacataacatgtggccttttgtgactgacttctttcactgagcatgtttttaaggttcctccatgttgtagcctgttttcagtatttcattcctttctattttcagataatattccattttatggatcctactttctgttttatttgcccattcatcatttgatggatgttcaagctgtttcagtgttttggtttttttgaataatgctgctgtgaacatttgtgtagaagttgttctgtggtcatcagttttatttctcttgggttgctgggtctgtggtaactgtatgattaaccttttcaattcaaggactactaaactagttttcaaagtgcctccgtcttttttttttttttttttttttttttgaggcggagtctcactctgtcacccaggctggagtgcagtggtgcaatctcggctcactacaacctccacctcctgggttcaagcgattctcctgcctcagcctcccaagtagctgggactatttttgtatttttgtatttttctaattttgtatttttagtagagatggggtttcaccatgttggccaggctgttctcaaactcctgacctcaggtgatccacccatctcgacctcccaaagtgctgggcttataggtgtgagccactgcacccgaccgcctccatcattttatattaccttcagcagtgtgtgggggttgcagtttttccacatgcttatcaacacttgttactgtctttttttattacagctatatgaagtggtaggtgaacggcattttagcaggcaaagagtgaaaattcagggctgaagtttctgttataaaagtacaggtcaggccaggctcggtggctcatgcctgtaatcccagcactttgggtggccgaggcgggtggatcacctgaggtcaggagttggagaccagcctggccaacatggtgaaaccccatctctactaaaaatacaaaaattagccgggcgtggtggcatgcacctatagtcgcagctactcgggaggctgagacaggagaattgcttgaaaccagaaagtggaggttgcagtgagccgagatcatgccactacactccagccaaaaaaaaaaaaaaaaagtacaggtcaggcccaaggaatggtgaataatccattggataagtggagaaacatagagaagggatgaccctgacaaggtggcttgacgccagatcatggaggatcttgcatataacgatggtaaaatgtttggactttattcttttggcactttaacctgggaagtggcttgatctgaactgtgtggatgaatgataaccctggcaagagaatagaggagaggatgagtgagagaacagaaagttagaggtagagcagcccttcaggaacttattgcctattgcagtcattgaggagagatgatgctggtggaaacagcagaagtggaaggaagaaacagagtcaagagagagggcaggaatggtaactaaatggaatgagaagagtggatacggttgaagtttatactagttcctggggcaggtgcctagaaccattgaccataaatggaatggaggaaggaagatgagtaataaatttgattttagatgcatgatgcctgggatgtttaagggatgagtggatgaccacgatagccatcttcataccttctttggtcacatgtacctcctgaaaaaatcctggaaaactatgtacctcctgcatatatacatatatgttttaaatatatatataatatatatgtattttatatatatgtgtgtttttattttttatatatatatgtgtgtgtgtgtgtgtgtgtattttagaccaagtttcactcttgtcgcccaggctggagtgcaatgacacgatctctgcaatctccacctcccgagttcaagtgattctcccgcctcagcctcctgagtagctgggactacaggcacttgccgccatgcccggctaatttttctatttttagtagagacggggtttcaccatgttggccaggctggtctcaaactcctaacctcaggtgatccacccgccccagcctcccaaagttctgggattacttgagccaccacgcccggccataagcatacattttgattgagaatgtatctcttaatgagataggccttttgtttgtttgtttgtttaagagatgaggtctcgttatattgttcgggttagtctggaattcctggcctcaagtgatcctcccaccttaatcttctaaatagtgtggactacaggtccacacccagctaggacttttgttgttcacttagttgacatatctggatgaattgggtccatttatatttcttatttttatggatgtaagcactaagaaatattgctcacataaacatgtagatgggaatggaaggcattttttgtagctgtaacaattatttgaattccttctgatgtatatgccaagattacgtaatgatcagtcatcaaaaattatttttaattatctgtcaattgacaactcaattaggtctttcaaatttgtggtaagcaaagaattggaaactctctgggaaaataagcaagatcaatcgttattcactttactttttctaggaaaaataccctaaaaaaaagctttaccaatacttacctaatgactattaagtagtcttattattctttcaacaagaatcttgttccctgtatccaatatgtatggaagagttggggaaatcaaaatactgttagtttcagtatacctttccaatatgatatttttgacaaaatacttttattgtgtgatacgcttttctaataacttttttgttgttgttttttgagacagagtcccaatctttcacccaggatggaataagtacagtggtgcgatctcggctcactgcaacctctgcctcccaggctcaatttatcctcctgcctcaacccgccaagtagccaggactacaggcgtgcaccaccatgcctggctaatttttatgttttttgtttgtgttgtttttttcgtagagacggagtttcaccatgttgcccagactggtctcgaactcctgagctcaaaggatctgcctgccccggcctcccaaagtgctgggattacaggcgtgagccaccattcccaaccatattgtgtgacatacttttaaatagagttttgtcaaaactgtggctatagattagctctttccaaaaatgggaaatgaccaccatataacctaattggtaaagccagtctttattgctaaattagacttcttttctttgtgggttttgttttgttttgttttgtttttgtttttgttttggagatggggtcttactctcactatgttgcccaggctggtcttgaactcctgggcttaagtgatgttcctgccctagcctcctgagtagctgggactacaggcacatactaccatgcctggctggcttcattttccttttcttttttgaggggggtggggggaatggagtttcactcttgttgcccaggctggagtacagtagctcaccgcaacctccacctccgggattcaagtgattctcctgcctcagcctcccaagtagctgggattacaggcgcccgccaccatgcccagctaattttttgtatttctggtagagacagggtttcaccatattgcgcaggctggtcttaaactcctgacctcaggtgatctgcccgcctcggcctctgaaagtgctgggattagaggcgtgagccactgcacctggcctcatttttcaattcacataaactatttagtacacatcccatgacaactattgtcaattccaaaagcaacaagctgagctctaattgactttgtttcctcacacaacactttgaaaagacatgagtttgacaccccaaacaggataatatttaccattttaatggtaatatccagcagaaccttagacaagaaacagtagaatctaacttttaagaaaactttattaaaatgtaattcacacactataaaattcatccatttaaagggtacaatttagtgggttgctttttttctgtattttcacagaattgtacaaccatccccaatatctaagtttacagcatttttatcaccccagcgagaaacctggtacccattagcagctgctccgcatcttctccctcttgtttgtgcccggcttctttcactgagcgtagttttcaagggtcatccatgttgtagcattggtcagtaagtacttcattcatttttatagctgaataatattgcagtgtatcagtattttgcattttatttatccatttatcaattgatgggaactgtctgtaactaggtatttggtaattccaaacatcttattttccaacaggcagagtaagatttgttacatgtaataaactccaagggtctattaactttttcattataacaaattgtgtaaatattgctttcagttagttacccacagtccttttgcagtagagatagttgtcttggttttaattggattcatgatctacaactttatgttctaatctcatgtcatttttattatttttagtaaaagtaatttgtttgactaaattaactggtaaacagttctgagctttttcaattgtgtctacaaattttaagaaattcagattatgtgccagatgtttttagtaacagctttgttgcggtataatccacataccatacaattcccatatttaaaaagtacaattcaaagtttttagtatattcagaattgtacaaccattgccagagttttagaacatttcatcaccctccaaaaacacccatgcccattgcagttcaatctccttttcccctcacatccccatcctgccagccctaggcaaccactaatctgctttctatgtatagatttgcctactctgggtatctcgtgtaaatagaatcatccaatatgtgatcttttttgtgactgtctacttagcataatgttttcacggtttattggtgaataatattccattgtagacgtctacgacattttattcatcagttgatattgggttgtttccatttttattttttactattatgaataatgctggtataatcatacatgtataaatttttgtgtggacatatgttttcatttctcttaggtatatgcccaggagtgaaattattgggtcatatagaaactctatgtttaaccctttcttttttttttttttgagacggagtctcactctgtagcccaggctggagtgcagtggtgcgatcttggctcactgcaacctccacctcccaggttcaagtgattcttctgcctcagcttcctgagtagctgagactacaggtgtgcgccaccacgcccagctaattttcgtatttttagtagagatgggggtttccccatattggccaggctggtcttgaactcctgacctcatgatccgcccaactcagcctcccaaagtgctggaattacaggcatgagccaccgtgcccagcctatgtttaacgttttaaagaactgtcgcactgttttccaaagtggctgtgccattttacattttcactagcgatgtatgagggttctaattttttcatatcctcaccaacacttgtttttgtctctctttttgacccaaagatttttttaaattaataaaacacttttctgaaaataaatatatttttttaatgtgggaaaaagcaataaggccattgttatgcccagtcaccatagcattcctatcggtggagagactcatgcaccgtttccaacttaagcccaaatcaactcaaatgcattttaagattttcttcatcatttgtattcctagacaattctttaatctactaccttttttgccacaatctgctacacattctgccttttcaagcactaaaaggactctaggagttttttgcaaagaaatgctgtcataagagtggtggtatcaaagtattgtttaacggtagtctcaaagactttcagggtaatgcattctgtgattatagagatgaaagaaacaacatcataaagtgaaggtcatcttcattcccaccaccttattctcagtatatctgaaatcagaacatcctaataaggaccaaaatactttgttcctagttattcttcacccttaacagaaataagtaaaacaccgaaagatatgaggccctcctaccaaggatttctagtgctttaattaaagaaaatttcacctacactcatactatttttcagtttgctttgtttggtgtcctggaggtttttacatcctggaacagtgcacagtggtaaaattcagaatggatgaaaagtaggattggtttgtttgttttcaggaagtgaggcaatcgtaaaagggaaaaatgggaaaggcgaaacaagcaggatgtctttttttttttttttttctttttagacagagtctcactcttcgcccaggctggagtgcagtggtgtgatgtcggctcactgcaacctccgcctctcaggttcaagcgattctcctgcctcagcctcctgagtagctggaattacaggcacgtgccaccatgcctggctagtttttgtatttttagtagagacagggtttcaccatgttggttaggctggtttcaaactccagatctcatgatctgcccgccttggcctcccaaagtgctgggattacaggcgtgagccaccgcgcccgtccaggatgtcttttttctaattagagacgagggtctcactttgttgcccaactggtcttgaattcctgggctcaagtgatcctcctgccttggccttccaaaatgttgagattattgatgtgagccaccacccctggccagaatttcttgtctgtgggagcattctcagatcagtcttatgaaaaaggacagccagcccttcctatctgcagtttctgcatctgcagattcacccaactgtatatcaaaaacatttgaaagaaaaatagtttctgaaagtttcaaaaagcaagatttgaatttgctgagcaccaagcgctatgctgtgtccacatgaatgaagtgatgtgtaggcatactctgctgtatcctcccgccaggacagaagaaaaatgtcacatagttactgacagtacagtgtagcaactatttacatggcatttatttaatacattgtattgagtattataagtaatctagagatggtttaaagtgtgcaggaggatgtgcataggttatatacatatactacaccattttatatcagggacttgagcatccttggatttaggtatccgaggaggccctagaaccaatcccccatgggaaaccaagggatgtgaaaattgagggtctgaatttgtttaagattcacagaacagactgaaaagacaagagaggagataatggagagaacaagctcactgaggaagtgggcgggaggaaatggggcaagaatagtagaccagaggaagaggaggagcacatctgtctcagagtcagccacattttatttggggccaagaacaaaaataaagtgactgtaatcagtagggctttaactccttctgctgtcctgcagttagctttttatgtatcctggggtgtccaatcttttggcttccctgggccatactagaagaagaacgattgtcttggaccacacataaaatacactaactggccgggtatggtggctcacacctgtaatcccagcactttgagaggccaaggtgggcagatcacctgaggtcaggagtttgagaccagcctggccaacatggtgaaaccccatctctactaaaaataacaaaaatgagctgggtgtggtggcgggcacctgtaattccagctattcaggaggctgaggcaggagaattgcttgaacccaggaggtagaggttgcagtgagccaagatcgcacccttgcactccagcctgggtgacaagcgcgagactccctctcaaaaaaataataatacactaacagtaacaatagctgatgagctttataaaagaatcataaaaaatctcactgttttaagagagcttatgaatttgtgttggaccacattcaaaaccatcctgggctgcatgtggcccgtgggctgcgggttggatgagcttgagtacctggtcaaaatttgggaacattgatggcctaaaaatacgtatatttcctgtgtgatttccttaatattttaaataatgttctaaccatctctgcttttagtcagcctcatcttggagtcaagagactgggctcctgacttactttgtctttctatatgttttctcttccacaatcctaattttttgtcatctagtcccataaacattccctctttatcaccattcttttctttaacccttagccttacttccatttcagtgttctattgtgtaagctgctagcgacaatattcaacttaagactacttggtaggctgggcccggtggctcatgcctgtaatcccagcactttgggaggccaaggcaagtggattgcttgaggtcaggagttcgagaccagcctggccaacatggtgaaactctgtctctactaaaaatacaaaaattagctgggcgcgatggtgggcatccataatcccagctacttgggaggctgaggcaggagaatggcttgaacccagcaggcagaggttgtagtgagccaagattgtgccactgcactccagcctgggcgacagagtgagactctgtctcaaaaaaaaacaaaacaaaacaaaacaaaaactacttgatattagcttgggctgctatgacagaatactgtagactgggtggcttaaacaacagaaatttatttctcttggttctgaaagccaggaagtccaagatcaagatgctggcagatcccaagtcagatgaagtccctcttcctggtttgcaagtggtagtattctctttgcatactgacatatgcgggtggggagagccagcaaggtctctacttatttttgagcacttatctcattcataactccacccctcatgacctaattatctcccggaggctccaactcctaataccatcacactgggggttaggattttaggggggacacatgtagtctataacaatacctaaagtcatattttctcataataactaaattttatgtttgggacttttttaggtttagcatgagctttaacagacataatctgaaatactatgtattaccgaaaaagcctaaaaaggtggcatttgattgcctagaatggatcagaaagcaccacccatgtgagtacagccatgtgattagctgtctagaagtaacaaatgtctttttagtaccacaataagatatataaaattgcatattaaacattcctttttgcattatgacagcactaacttgctctttatagagcagactattgcaactctctcaattctggaaattataaaatctcatttggtttaataacaataaattctaacaaaaatatattaaatactccctcctacacacgtatattataacttttggtttcaatgtctttcctcaggcttctatcagtgtttgaattatacagctttttgttttagtgccttgtcccaagcctgtctgcctttgcattatgttaactaaaatgagattctgaaattcatagtagttttccatgtaaccccctttccacttttccatggagaatatttttggtatttctattttattttttagaaattagtatacatatttgtgtggacaaatcagtcagtagagatctaccaagaaaaagtcagtgatttccccgctcagactcacctcccccaggcagctaatgtcaatagcttcatgtgtatatctagacctttggctcagtcacagagagatgacttttcctttaatatcttttaatttccatttctaaaaataacacacataataataaatataatatatgctcattaaagaaaatttatatggccaggcactgtggttcacgcctgtaatctcagcattttgggaggccgaggtgggtgaatcacttgaggtcaggatttcaagaccagcctggccaaaacggtgaaaccccatctctacaaaaattatccagacgtggtggcacgcacctgtaattccagctattctggaggctgaggcagaagaactgcttgaacccgggaggcagaggttgcagtgagttgagatcgtgccactgcactccggcctgggcgacagagcaagactgtctcaaaaaacaaaaaagaaaatttagaaagcaacaaaaagaagaaacaaaagacaaacatcactcaatgagcaaaatcactgttatgttattattaatttctagtatttttctatgcatttttttctactagcatactatatacgtttctaccgttaatctactttatatatcatgagcattttcccatgtcttttaaaaacttagaaaacacttttgatagttatagtatattttatttcacagttccctgtatttgtttccctaatgttgctcagtaaaatctttgtaatttttaaagtttgaagtaaaacttttgtttatgtccttgtatcactttatttcctaatttcccagaaagaaactgagtcaaaggtatttctaagactcttgatacatactgccatatgcttttgacaaagtttgtgcaagaatggcttttcttttttttttttttttttttttttgaggctgagtctcactctatctccaggcaggagtgcggtggtgcgatctcggctcactgcaacctctacctcctgggttaaagtgattctcctgcctcagcctcctgactagctgggattacaggtgcccaccaccacacctggctgattttttttgtatttttagtgaagatagcttttcaccatgatgtccaggctggtctcgaactcccgacctcaaatgatctgccctccttggcctcccaaagtgctgggattacaggcatgagccaccgcgcccggccaaggatggcttttttatacccacatgtatctagtgtgaagtagagcccagagttcatccaggtccacctcacgagtcattagcagcgacaggattaaaagccacatctcatttccagcacacatgaattccttgcttgaattattcacgtgtgtggtcttccagcagtataagaacactacgggagatctatttatggttcatatatttctgaaaatgtagtgtaaattgtgtttttgtttatgttaaaaattcttgtttctcagtactcttggtttcttggcagatgattcagggataatttactgcctctccaggcgagaatgtgacaccatggctgacacgttacagagagatgggctcgctgctcttgcttaccatgctggcctcagtgattctgccagagatgaagtgcagcagaagtggattaatcaggatggctgtcaggtaacatttttaaagataaacaaataatagaaataatcttttatagcatataaccaaacatgcacatgtagaatgcaaactgtttttaccttgaaggtagtaaacatcaaaataagactgaaatttaaaaaacagattttctttgagacttctaaagttgctttttctttcataaaaaaaatctgcttgagatataattcacatatcataaaatttatcctttcaaagcaaacaagttagtactttttagtttatttgcaaagttgtacaataatcatctctatctaattccagaatttttgatcaccataaaaagaaacctcatacccagtcacttcccccaccccctaatgcctggaaaccacaaatctactaactactgctaacctgtttctagagtttattactctgtacattgcatgtaaatagaatcatacagtatgtggtctttgtgacttttcttttttttttttttttccggagacagagtctcactctgtcgcccagactacagtgcagtagagagatcttcgcttactgcaacctccgcctcccaggttcaagtgattctcctgcctcagcctcctgagtagatgggattacagatgtgcgccaccatggccagctgatttttgtatttaatatttttagtggagactcaaactggtctcgaactcctggcctcaagtgatccacctgcctcagcctcccaaagtgctgggattataggcatgagccacctcgcctggcctgtttgcttttatttagcataattttttcaagatttatccatattttaggatatatgagtacttcatacctttttatggtcagataatattctgttatatggatataacacagtttgtttatctactcatcagctggttagacatttggcttgtttcgtttctttctttttttttttttttttttttttgagacagggtcttactctttcattcaggctagagtgcaatggcatgatctctgctcactgcagaccgtacctcaaacaatcctcccacttcccaagtagctaggacgacaggcgcaccactatgcctggctaatttttttattttttgtatagacgaggtctccctgtgttgcccagcctggtcttgaactcctgggctcaagtgataatcctgcctcaacctaccaaattcctgcgattataggtgtgagccaccatccccgatgtgtttctacttcttggctactatgaataatggctttgtgagcattcacgtacaagtttttccacggacatatgttttcagttctcttgggtagacacctgggagtggacttgctgggtcaaatggcaactctttgtttaacttttagaggaactgtgaaactgcttttcaaagtggctctgcagttctgcattctcaccagcaatgtatgaggtgccagtgtctccacgtcttcaccaatattttttattgtccagcttttttaatgtattcatccttgtgtgtgggaaatggtatctctttgtgggtttttttttatttacatggaagaccacacacgtgaataattcaagcaaggaattcacgtcacccaggctggagtgcagtggcgcaatcttggctcactggaacttccgcctcctggttcaagcaattctcctgcctcagcctcccaagtagccgggactataggcacatgccaccacacccagcttatttttgtatttttagtagagacagggtttcaccatattggccaggctggtcgtgaactcctgacctcatgatccgcccacctcagccccccaaagtgctgggatgacaggtgtgagccaccacgcctggccctctttgtggttttgatttgcatttccctagtaactaacaatattgggcatctgtttccgagatgagaaatttgccgtcacccaggtgggtggggaggaaagctgaaaatactttaggcatctcttttttttttttttttttttttttttttttgagacgggagtctcactctgtcgcccaggctggagtgcagtggcgcgatctcagctcactgcaagctccgcctctcgggttcacgccattctcctgcctcagcctcccgagtagctgggactataggcacccgccaccacgcccggctaatttttttttgtatgtttagtagagacgagggtttcaccacgttagccaggagggtctcgatctcctgacctcgtgatccgcccgcctcggcctcccaaaatgctgggattacaggcgtgagccaccgcacccagcctactttaggcatctcttattgtggtaaatgccagccttggatagatccctctaaatgaaaggatgaatttcagcaaaacaactaataattacttggagccaatgaaaagtttcagctcaggaaaaagtatttactttgaagattcagaggaaaaatatctctcaaaattgttttctctgggaaaacagaaaattttagaggatatcagtttagtatcccgagaaagatataagaagacttaatatacgtgaactagtaacaacttccataagatcacagggtgagatgaagggagaaataaaaatccagtttatggccaggtgcagtggctcacccctgtaatcccaccactttgagaggccgatgtggacggatcacctgagatcaaggagtttgagaccagcctggccaatatggtgaaaccctgtctctactaaaaatacaaaaattagccggacgtggtgatgggcatctgtagtcccagctactcaggaggctgaggcaggggaatcacttgaacctgggagccgaaggttgcagtgagccgagatcgtgccactgtactccagcctgggaaacagaacaagactctatgtcaaaaaaaaaaaaagaaagaaaaattcagcttatccaagtaagaaaaacaaaactaagagcagaattatatattaagacacaaatggaatgactcagtctcagtggagacaatagaatcagtgatgtagtgagtagcttgagaatgcaagggaaaaaagagattaaaatggggtggggtggaaattatctttgttgacaaaaggaggtaaggattcagcctaagaatagtaagtgtacccaagcaagaaagcaggataattgaaacagataagtgtgttataaataaatacataacaaatatataacaaaaataatagaagactgtcttcagaattggaagaaggaagactgggactgaagaatttcgtacccagctcactgtcatttatgttgaaaccaacaaaaggtcattttcagatatgcaaaaagtttagaaatacatcactcatttgtcttcactgaaatactgattttagtcttcccaaattagtttatatatttaacccaaatgccagtgttttgttttttttttttttttttttttggttttttgttcttttccctttgataaactttttctaaagtttgcctggaagaatattcaagtgaaaataactaagagagtttggcaaaaaacctaataatacaggaacactagtttgcagtacattataggcagatcagtggaacaggaaaacatgtaaaaacaatacatgataaggaaaaagtttgcatgaaagggccaggcatggtggttcacacctgtaatcccagcactttgggaggccaaggtgggaagatcacttgagcctaggagttcaagaccagcccaggcaacatggcgaaaccccatctctacaaaaaatacaaaaattagcctggcatgctggtgcacacctgtagtcccagcttctcgggagtctgaggcaggagaatagcttgaaccctggaggtggaggttgcagtgagccaaaatcacgccactgcattccagcctgggcaacagaccgagactgtctcaaaaaaaaaaaaaaaatgatttttttcaagtgctttaaatggttatgtatagtataaataatctacaatggagatatatatatatatatatataactttgataaaaaatatggttaaacaataggggtttataaaaacctaattatttctgctctcagactaattaatccttacagtcagcatgtaatattagcctacaccagctcgacagacttgatctcgttagattcatgagatagaataaaacttggccattattcttcacaaagaatgattgtggcttgaagttttaaaagcgcagaaataaagaaggaaatcacaattaaacaaagccacttttcccaatttcaagaaataagagctttcagaaagagttggcagccttgcatcctcatctggaggctgcaggcggtgcctcacagccctgtgcccgccctgatactgggagatgcacctggacttcatggaaccctgtgggtcatgcttccggacctgtcggctgacacatcttgctgtgcagcttctccacctgctctccatcactagaagctacaatagtctttctgtttccaaggagatttgcctttgatcagagtgccataaatgtagatggatgactaaccgagagcgcaggccactcaccgccattcctggtgttgataaatgtacccctttactgtccacatactccagagcttgcagttccttccgctggtactcacagttactgaaatcatgtcattagtctcagtctgcctgccagatatttcagatgcctttgaaatactgttcttgcagtagcaattcatttttttaagtgctaaaaaaaaacttgcagttttatttgtgaagtgtaattttgcctggagatataacattttggtctgggttaaatagctcctaaattctcaactgaaatggatatccttgaaaactgatttatcaagctcctgagagtgaactatcaccttgcttccactaagtaatttgtaaggtctaagatccgcagtccctggtgtttttttttttttttttttttttttttttttttttggtataagtagctctcagacttttacccacatgagtttccattaaaattgtacaagctttgactttaaatcagctgatgaatagaaggagttgatgtgtgatcagctggtgctattgggaaaactgatgataagcagtggagcaggtaagaacgtattgttcctgaaccattggaggaactagcagcagtgacctctgaggagccctgggaacaccctggagctcctgagcaacacgttgcttgtgatcactgacctggatatcatgactgtgtgagcaacaccccccacacctcagtagcaaaaacagagaacagtggcagcacatcgtgggctgactgcagttgattctggctctcttacatgagaatgccaagtcatacaagaaagtgcctgccatgctgagcttctctttaccttcttgggttttaatggcattgcaagttatcagtataaaaactcatattagttatactaaatagttggaccaagttaagatattaggttgttatgtagtgtgcattttaaagtaaaacaaatgatagagcttttagaagcatctattatgaaaatgttccttcaagtctgtgccttatgaatctaataagcttttgcttttatatcaggttatctgtgctacaattgcatttggaatggggattgacaaaccggacgtgcgatttgtgattcatgcatctctccctaaatctgtggagggttactaccaagaatctggcagagctggaagagatggggaaatatctcactgcctgcttttctatacctatcatgatgtgaccagactgaaaagacttataatgagtaagctgggctccattgtagagacattctgtcatcttcagcctcatgatagtagtctactcctgctattgtggtacttctggtccagttttccttaaataatcgtagaaaaatagaggagtttatacagattggcaattttattttagttcatttttattataaaagtggtaagtgcttattttgtaaaactcaaatgatacagatgtgtacaaggcagaaaatttacaaaccatgccttgtagttttgcccccaaaataactctagttattggtttcctttgtatcctttcagaccctatttctgcatgcattcttgcatgtaacacatatttcaaacatgcaggaagataaaaaggagaaaataatgagctgtcatatactaccatctggattaagaaataaaacacaatcaatcgagctgaacccctccccaccaccccatagcctctcttgtctcatccgtcctctcccattagaggcaggcaaatatcttgtatttggtatgtaccttttccaaatgcacatattttaaaatgtaaatgggattatattatacatactttatatatataatgacccgatttttttcagtcaacagtaggatgtaattatcattccaatgaatacatacagcctgactacctagaattccgtagtatggttattccatggttattaaactaatcccctcttactagatcttgtttattgtttttcactgttatcaacaatgcagtattgaacatccctccctatacaaatatctttgggcatttttgcagttacttatataagattttttttttttcaagaccgagtctcactctgtcacccaggctgcagtgcagtggcagaatcttggctcactgcaacctccgcctcccgggttcaagcgattttctcacttcagcttccagagtagctgggactacaggcatgtgctaccatgcccaactaatttttgtatttttagtagagacagggatttcaccatggtgtccaggctggtctcaaactcctgacctcaggtgatccgcccacctcagcctcccaaagtgttgggattacaggtgtgagccaccacgcccggccttataggataaatttctagagttaaacttgctgggtgaaagtgaatacatattttagaattttattacattctttgctcatttttctcctgggttgtgagagttaaatatatttcctaaatatatgtatttcttctgagaccacttttttttttcttttttttttttttgagacggagtctcgctcttgttgcctaggctgaagtgcaaaggctggaatgcaatggcacgatctcggcccactgcaacctctgcctcccagatgcaagcagttctcctgcctcagcctcctgagtagctgggattacaggctcccaccaccacacccagctaatttttgtatttttagtagagacagggtttcaccatgttggccaggctggtcttgaactcctgacctccagtgatctgtccgcctcagcctcccaaagttctgggattacaggcgtgagccactatgcccagccgagaccacttttaaattaactctggcagaagtacagtgcataggaaatggcacttaccaagcactgtgcccaacactgcatatatcacctcattaccttatttgttcaaaacaactaacttgtgatgtagaggtactcccataaaaagtgagcttcggaaaggttttgtaacttttccccaggatcactgatatggcaggagcaataagagtcgttgtagtagtagtataacaatggtaattattatagataagtgtttatttagcccttcctatgtgccattctaaatgccttacatgtatcatcaactaatttcatcttcacaataaccctcagagataaaacctttgctttcctcattttacagaggaggaaaatgaaatgcagaactagtaaatggtagagccctgacagaacccaagttcgtctgattccaaagtccatgttccttgcactataccaaagtgattctcagtgaagaaaattaaatatttacacttggtttgcccatttgtgttttttttaaaatctatattaaagctaggcccaaacatggccaggcatggtggctcacacctgtaatcccagcactttgggaggccgaggccaaaaaaaaaaaaaatttaggcccaaacaatttaatagatatttaagtcctgatagcagcaactatttgggggaaaaatactcataaactggaagaaaaaaataatattttttaaaaattattttcttttttttttttttgagacggagttgcgcttttgtcacccaggctggagtgtgatggcacgatctcagctcactacaacctccacctcctgggttcaagcgattctcagcctcagcctcccgactagcagggattacaggctcgcaccaccacacccagctaatttttgtattcttagcagagacagggttttgccatgttggccaggctggtctcaagctcccgacctcaggtgatccgcccaccttggcctcccaaagtgctaggattacaggcgtgagccaccgtacctggtgttaaaattcttaagtaacaacagttgcttactgatggaaagtatgccactgctgttctcacacattggaatcaaatccgacactgccaccctcatttcctgtttcacattgattttcttgagatacttctttttatcatagcaactgcgaaaaacccagctttgcaaagatgagatattgctaataggaatgtagcacaatctaatgttaataccattaactacctcaagctaataatttgggtgatgttcaacagatgttaggcattgctgtgtttcccttcatgtaaaatattctgtctctgtgagttcaccacagcacccccgggcttgttggcacacaattttggaaccactggtgtaactactttgacctcagatactcagagaagtgcatggccactgccgtaatctcaggctctgcttcctcaggatgttcagttcggtggatgctcgactgataaatacagcaaatataagtcaaaccatcatcattggggataatgaagatttgaaaaaaaaaaacctaacatttattcctatagtactaaaatcttgaggatgaacattaatactcagttaattataatatagaatgccatgttgacaatgctgttaacagtaattttcttatttaatatttaaagttatatgaatctattctaaatatttctatgatatgctctatttttcccctataagtatgtcttactatagtcttcatctcttttagtggaaaaagatggaaaccatcatacaagagaaactcacttcaataatttgtatagcatggtacattactgtgaaaatataacggaatgcaggagaatacagcttttggcctactttggtgaaaatggatttaatcctgatttttgtaagaaacacccagatgtttcttgtgataattgctgtaaaacaaaggtaaaaaaagaagttttaaaattctttataattaaattttttttctcttactttaaaaatgtagatacaaattagattgcaaaaggtggtctccgacagattaacaggggaaagacagcttccttccagtagtaatttggaatggaaacatttaaaaagtaatttcatgcggtatcttttctttataattagaaccctgttaaaaaatataatggacatcagcatatccagaatattgagtttatatatgtgcactgatgattacagaatattttagaaatattaatatgcaaacatccaaaaagatccaacatgggcaggtagaatattttaaatttaatatattaatgttattaatataatacattatattaaaaatttaattgattaaattaaatatattaaaattgacgtattaatatttaatattttaaatatttaattaatatactaaaaatctcattctcaaaagagtaataactagtgtaccgtatgtttgaattcaaatcaattacattactctttttttttaactataaagaataacagtaactgcttgtggataaattcactattatctgtcctaaaatacccttggaaggttgttaaattcagtcattaggtacttattttacctatcttggtaattctacattttaatgtctactgtaacctactgcttactgagcattttcacgtttggtgtattatttacctatctgggagtattagacttatatgtgcaagatgctggagagccacaagtgaccatggtatggaccaattcatagactggagtggagaccgacatacatgtgttcatagaagtttaacactctggcttggcgcagtggctcatgcctgtaatcccagcactttgggaggccgaggcaggaggatcacctgaggtcaagagttcaagaccagcttgaccaacatggtgaaaccttgtctctactaaaaaaatacaaaattggtcggctgtggtggcccatgcctgtaatcccagctacttgggaagctgaggcaggagaatcgcttgaacctggtaggtggaggctgcagtgagccaagatcatgccattgcactccagcctgggcaacaagagcgaaactccatcaaaaaaaaaaaagtttagtactctcagtaagtatagttaaaaaatacagagcacagggcagaacagagggtagtctctctcagtgtggaactggcaaattcatgccatctcctcccaccccaccccatcccttaaacattgctatcagttccctcattcaacagatatttgttgggctgtgtaacaggcactgttgtaggaatttgggatacatcactaaacaaaatgaaaatccctgcccttgtggagcttacactctagcagagggaggccagttacaaacaatatacacaataaatatacatgaaaggataagagctgtggtgaatggcacagcagagtaaaaagacaggaggaatgggtagagtgcaggatgcagtattagacggggtggtccttggaagtctaactgagaagatgggagctgaggaaaatcttgaagaagggagttagctggcagctccctggatgtgagctttcctgcaagaagctttggctagagcaaaggccctaaggtgggggtgtgcctggtgtgttcgagagatggcaagggagcccatgtggctgagcaggattaagagccagtgaggggaagaggtgatggagagccagagcagtcagttgagggctagagtcccagagtaactggaggcctgagtaactggaaggatggagttatccttggctaagatgcagaaggctggttggcagagaagatcaggagtttggtttgggttacctaaattgggaatctaatattgaattacatattaagattcaaaaattctgaaaacagactggtggcacatgggtgatatttaaagcatggccatcagctgacagtcgggataagagaagggacggaagagaaaggagaaagtatgaaatagttgtctaggacaggggtcagtaaacttgcttttaaagggccacagcataaatattgtacacttcgcagccatagtctctgtcacaacgactcacagctttgccattgtagtctaaatgcagacataaataataaatacaccaattttctagtcatcttccatggctgtgttccaataaaactttatgcacaaaaacaggcatccagctcctgggccatagtttgctgacttctgttgtgagagaatggaggaatgataggctagggaagtataaagataatgattgcctacagcattaacagtccattcgagctttgtggccacgtagtgacagtgaaaatgccaagttcagccacataggtacagggacctatggagatggagaattggatccattatgttttgccaggtaatatgttgaagtgatctaagggcaagagagctgagggtctatgagaggtagtgattataatgatcgactggaatttcagctgagttaggaggacatctgaggttgaggatcagcagatgggcattcccaggggattgttggagtcagaataccacatggtatgagttggaaagataggatgtggtggtctgagaatggaggagttgccattattagtaagcttaaggtaggaagtgtgagcggctgatgtatgtggaggacaggatcattggagcagaggagatcaagaaccaaaagaccaaagtaagaggatcagctctgtatacctaatcaccaagaattaaggtagatggccaggtgcagtggctcacacctgtaatcccagcactttgggaggctgaggccggcggatcacctgaggtcaggagttaaagactagcctggccaacgtggtgaaaccccatctctactaaaaatacagacaaattagtcgggcatggtggcaggtgcctgtaaccccagctactcaggaggctgaggcaggagaatcgcttgaacctgggaggtggaggttgcagggagccaagattgcgccatcgcactccagcctgggcgacgagcgaaactccatctcaaaaaaaaaaaaaaaattaagataggaatggagtgacagggcactttttcttgatgactctagatagggcctcagaatcacttgcagttgttagtgtaagaccagaaacctgttcatctccaggttattggtgtgtgcaaatgacaaggattagaaggtagggagggctgcatacacagaagcaccaagcatgatgcagctttttacacctgtgagtggtcagtattgatggtagagagaactaggggagagaaaggcaaaaagtcatctagtaacggggactctaaaaagtgggcaaagtttggggatagctgaaggaaatgagaaaggaaactagcaggagatgatgaaaagagcgttgactatggcaccaaagaccccagaggggttagaatccgtggatttacgtggcaccccacaggttcccacccagtatgtaacagagcactattctaggaggcatggaggatttaaattgtgtgtttgtgtgtgtgtctgtgtgttatatatgtgtttctacccacagagtgctatcaggtagttgaaagacaagacgtatctctgtgaaacagtaacaacatcgagtggtagttgttctagaacttagataagaatgaacatttgaaatttccgtaggttttggtctcggtattggtctggaaatgggttatgatgaatctactatagttaatattaaaccctagtaatctaggcattgttaccttaattatagcagaaagtattctctttttattcataggattataaaacaagagatgtgactgacgatgtgaaaagtattgtaagatttgttcaagaacatagttcatcacaaggaatgagaaatataaaacatgtaggtccttctggaagatttactatgaatatgctggtcgacattttcttgggtaagtcatctgttttgaatgtttgagttacttcaattgaaattgaacatctaaagaatttattacaagtacatagaaaaactttttgtctattttcttataaaacttgagtttctgaataaaacttttaagtaacaaaagaaagtcaattattatactgttttatataatgtatatgtcactaagttgagatggtttcacatacaaagaagaaaataataaagcttatgcgagttcatctgagtgggtggaatgtaactattaaaatgtcagtaaggaaataaaatgaggattagacccataacagcatagagaataggagagagactattatcagattagtgccttaaaaatctctcaggggctgagcacagtggctcacacctgtaatcccagcactttgggaggccgaggcgggcggatcacctgagatcaggagtttgagatcagcctggccaacatggtgaaaccctgtctctactaaaaatacaaaaaattagccaggcatggtggcatgcacctgtaatcccagctactcgggaggctgaggcaggagaatcgctagaacccgggaagtgaagactgcagtgagctgagatcgcaccattgcactccagcctgggcaacaagagtgaaactgtgtctcaaaaataataaataaacaaacacacacaaaaattagccaggtgtggtggtgggcacctgtaatcccagctactcgggaggctgaggcaggagaatcgcttgaacctgggaggtggaggttgcagtgagccgaggtcacgccactgcactccagcctggcaacagagtgagactccatctcaaaaaaagaaagaaatggacagtaaagaggaagaccaaataaatagaatatttgaccctgggtgatagaaataattgaaaatagtagtttgggagagaggggagagaagactccttagtatcgtcttaaagagtttttaaaataaatacttaaataataattgaataatggaaaagaaataaaaatgagaaagagctgtcaattttaaatgattgacaaagtaaatttagtggagaggttggaaaataaagtcaagaaaatttaggaactgatcaaaatgatatatggaaaatagagaaagcatagaaaggattaatcctcagtagatgtaaaatctgacaaaaattttggaaatagaaaataaagggaattatcaaaccaatgatctaggaaaacttcctagagtggaagagataaaagttttggattaaaatgctcactgaatgccaaataagatgcctgtaaaaaaaaaaaaaaaaaaaaaaaaattaagacatatggccacgagatttgagaatactaagagttaaagacatgtcaaagaggaaaaacttttcctcaaccctcttaggttcagtgatggggcctgcaaattaaaccaacaaaaaacagattagcaagggaaaagacagatttagtcatgtgtggataggagttcacagaaaaatgtggttcaaaggggcagttagaatgtggggcttatataccatcttaatagaggaaggggagaaggaggggggcacttatggaaaaacaaatgactgttaggaaagacagatggactgttaggagaccagatgggagatacaaagtttttatgacaatgtctgtttaagtgtggtgtgaagtcttatctctgtttaaaagggtcagccttccctggtttttcccagggaggcaatttatgacaactgagttcttttgggaggccctgctttttggcagataagagatttcagatgccttctgctcaaaataatttttatgccacagtggcatattctggaccccttcagagacaattctgaaagctctggaaagaaaacaggaacccaaaccagactgacatcagcttaatatcagcaatcctggagactagcaggcaaagaaagtgagcacaggtcgtgatttgataagtggtggaacccacccatgggtccagtgaagaaaacccatagtcacagtcaggcagcagggccagtaagcaatctatgcagactaacaaaagtcaggaggaggctgggcacggtggctcacgcctgtaatcccagcactttgggaggctgaggcgggcggatcacaaggtcaggagttcgaggccagcctgaccaacatggagaaactccgtctctactaaaaatacaaaataagctgggcgtggtggcacacaccagtaatcccagctagtcgggaggctgaggcaggagaattgcttgaacccgggaggcagaggttgcagtgagccaagatcgtgccattgcactccagcgtgggcaacaagagtgaaactccatctcaaaaaaaaaagaaggaacagggcccacccaacgtagagagagagtaagaaaggaatggttttattgataacagtgaagaatgcaaatgttacttctcaaccaaaaaaaaggagagaggcccttagaaactccagggaaaagattatacaagagagcaagatcaaatataaaacaaaggaagttgtggccaggcacagtggctcatgcctgtaatcccagtactttgggaggccaaagtgggtggttcacttgaggtcaggagtttgagaccagcctggccaacatggcaaaacctcatctctacaaaaaaatacaaaaattagccgggactgatgttgtgcacctgtaatcccagctacgcaggaggccgaggcagaagaatcacttgaatctgggaggcggaggttgcagtgagctaagatcgcaccactgcactccagcctgggtgacagagcaagactccatctcaaaaaaaaaaaagttggtaaaatgtacaaaaaagtcatccatttgacatgatgggtaaacattctccttttggttccataagagtcatgacattgttccaattagggaaggaaatttgtcatcatgtaaacaacgattgaaatcaacatacagacctaaacaaggttacaggacagaacaagatgtaaatgttaatattgatgatataaaagtaaaagtacaatcgctaaaagtaaaagaaggcatacagggaaggcttgggtactaatgacatctcacattgtgggaaggggtagtggtcagaagttctattgaaagttagaaacataattagtacatgacccaacagtatcatataactagcaaaattcagagaagaataaaacaaagtgggggtggtatgaatgagataaaacctcatctttcataataaaggggcaaggacaatagataaatgtcaggcttttggacagaaggcaagatttcaggtccttctgtgtgtaggtagccacctgaagagctgaaaacaaaaactgtttaaaaagcgattcccttggggaagggaaggatgagtcaggggaatgttgcttttaattataaacctttctgtctgggtacagtggcccatgtctgtaattccagcactttgggaggccaagacagacggattgcttgagcccaggagttcaagatcagcctgagcaacctggcgaaaccctgtctctaccaaaaatacaaaaattaatcaggcatggtagcacgcacctgtagtgccagctactccagaggctgatgtgggaggatcacctgcgcccatgagatcgaggtggcagtgagctgtgatcccgccactgcacccccagcctgggcaacagagcaagaccctgactcaaaaaaaaaaaattgtatttcagccagctttcgtagttgtcctcagcagtaaggttggtccataccattcagcctatcattagcagaacggtagttctgtttctataatgtggcctttcagggatacaaattacttaaagaaaattttgaataattcaggatatatggccagaagccatttgaaatggacaataatataattatttggaactctttaaaacagagctaaagctttacgtaataaccattaattctgatttttataaatgtcacaaggtctcttaagtagattgttacaataaagttgtgtttataatgaagacattagcagtcacagcagcttatgaatgaaacaaaggatccagccaactgtggctctcggctagtaagagaaagagggaagtgtgtgtacatattcctgtcttcatctctccccttgagcatcttatagggtgttgtgcttttcttttagaatttgaataggcttcattagtgagggtgacaaaaagaatagacttaaatacttggattataaactagtagcagttttgataaccagggccagggatcatatttagaaaactgactgtcaaaaattgtttgtagccaggctcagtggctcatgcctgtaatcccaatactgtgagaagccagggtgggaggactgcttgaggccaggagttagagaccagcctgagcaatgtagtgagaccctcgtctctacaaaaaaattaaatattataaaataatgtaaagagtgtcattggattgtttgcaactcaatggataaatacctgagggaatggatggcccattctccatgatgtgcttacttcacactgtatgcctgtatcaaaatatctcatgtactacacaaatatatacacctactatgtacccacaaaaatttaaaaattaataaatactagatgcacttaaatatttaaaatttttaaattaggtgggtgtgatggcctgcacctgttatctcagctagtcaggaggctgaggcaggaggatcacttgagcccaggagtttgaggctgcagtgaaccatgattgcaccactgcactccaacctccacaatagagtgagaccctgtctctaaaaaaaaaaaaaaaaatgtagataagtaatgcacagttatcctaatacatagcacagtgataggaagctattatggtttatgtaaactctttctttgatttatttgctccaatataattttgctgctgttttttgtccatgtgtattgtaaaaagataaggaaaagtacatacaaccatagaaattttagcgttctactcaaatactctcatttaacagaaatgagtgtctgtgccaggggtttgtgatctattccatctgtccaaacctgtccataaatgactttttagcctcttctatttgagggtgatgatatacgtacatttactcatcttacttcctgtatcttcttatcagggagtaagagtgcaaaaatccagtcaggtatatttggaaaaggatctgcttattcacgacacaatgccgaaagactttttaaaaagctgatacttgacaagattttggatgaagacttatatatcaatgccaatgaccaggcgatcgcttatgtgatgctcggaaataaagcccaaactgtactaaatggcaatttaaaggtatagtatttttcatgtttattttattatctcacaatgagtgaaccaaaatatattattgtgaagtatagtgtctttgtccaagcttatagatactgaatttatatatactgttctatacgaacatattctgtttttcttaaattggaaagagatcttaaaattcaacccaagtaatatgacacctgtcaaaagtaatttaatgggttatcaggtcactaaatctttatatattcattaaagaagcatttatcaagaggct

SEQ ID NO: 155 - DNA, 4437 bp, Homo sapiens
gcgcggcggccgtggttgcggcgcgggaagtttggatcctggttccgtccgctaggagtctgcgtgcgaggattatggctgctgttcctcaaaataatctacaggagcaactagaacgtcactcagccagaacacttaataataaattaagtctttcaaaaccaaaattttcaggtttcacttttaaaaagaaaacatcttcagataacaatgtatctgtaactaatgtgtcagtagcaaaaacacctgtattaagaaataaagatgttaatgttaccgaagacttttccttcagtgaacctctacccaacaccacaaatcagcaaagggtcaaggacttctttaaaaatgctccagcaggacaggaaacacagagaggtggatcaaaatcattattgccagatttcttgcagactccgaaggaagttgtatgcactacccaaaacacaccaactgtaaagaaatcccgggatactgctctcaagaaattagaatttagttcttcaccagattctttaagtaccatcaatgattgggatgatatggatgactttgatacttctgagacttcaaaatcatttgttacaccaccccaaagtcactttgtaagagtaagcactgctcagaaatcaaaaaagggtaagagaaacttttttaaagcacagctttatacaacaaacacagtaaagactgatttgcctccaccctcctctgaaagcgagcaaatagatttgactgaggaacagaaggatgactcagaatggttaagcagcgatgtgatttgcatcgatgatggccccattgctgaagtgcatataaatgaagatgctcaggaaagtgactctctgaaaactcatttggaagatgaaagagataatagcgaaaagaagaagaatttggaagaagctgaattacattcaactgagaaagttccatgtattgaatttgatgatgatgattatgatacggattttgttccaccttctccagaagaaattatttctgcttcttcttcctcttcaaaatgccttagtacgttaaaggaccttgacacatctgacagaaaagaggatgttcttagcacatcaaaagatcttttgtcaaaacctgagaaaatgagtatgcaggagctgaatccagaaaccagcacagactgtgacgctagacagataagtttacagcagcagcttattcatgtgatggagcacatctgtaaattaattgatactattcctgatgataaactgaaacttttggattgtgggaacgaactgcttcagcagcggaacataagaaggaaacttctaacggaagtagattttaataaaagtgatgccagtcttcttggctcattgtggagatacaggcctgattcacttgatggccctatggagggtgattcctgccctacagggaattctatgaaggagttaaatttttcacaccttccctcaaattctgtttctcctggggactgtttactgactaccaccctaggaaagacaggattctctgccaccaggaagaatctttttgaaaggcctttattcaatacccatttacagaagtcctttgtaagtagcaactgggctgaaacaccaagactaggaaaaaaaaatgaaagctcttatttcccaggaaatgttctcacaagcactgctgtgaaagatcagaataaacatactgcttcaataaatgacttagaaagagaaacccaaccttcctatgatattgataattttgacatagatgactttgatgatgatgatgactgggaagacataatgcataatttagcagccagcaaatcttccacagctgcctatcaacccatcaaggaaggtcggccaattaaatcagtatcagaaagactttcctcagccaagacagactgtcttccagtgtcatctactgctcaaaatataaacttctcagagtcaattcagaattatactgacaagtcagcacaaaatttagcatccagaaatctgaaacatgagcgtttccaaagtcttagttttcctcatacaaaggaaatgatgaagatttttcataaaaaatttggcctgcataattttagaactaatcagctagaggcgatcaatgctgcactgcttggtgaagactgttttatcctgatgccgactggaggtggtaagagtttgtgttaccagctccctgcctgtgtttctcctggggtcactgttgtcatttctcccttgagatcacttatcgtagatcaagtccaaaagctgacttccttggatattccagctacatatctgacaggtgataagactgactcagaagctacaaatatttacctccagttatcaaaaaaagacccaatcataaaacttctatatgtcactccagaaaagatctgtgcaagtaacagactcatttctactctggagaatctctatgagaggaagctcttggcacgttttgttattgatgaagcacattgtgtcagtcagtggggacatgattttcgtcaagattacaaaagaatgaatatgcttcgccagaagtttccttctgttccggtgatggctcttacggccacagctaatcccagggtacagaaggacatcctgactcagctgaagattctcagacctcaggtgtttagcatgagctttaacagacataatctgaaatactatgtattaccgaaaaagcctaaaaaggtggcatttgattgcctagaatggatcagaaagcaccacccatatgattcagggataatttactgcctctccaggcgagaatgtgacaccatggctgacacgttacagagagatgggctcgctgctcttgcttaccatgctggcctcagtgattctgccagagatgaagtgcagcagaagtggattaatcaggatggctgtcaggttatctgtgctacaattgcatttggaatggggattgacaaaccggacgtgcgatttgtgattcatgcatctctccctaaatctgtggagggttactaccaagaatctggcagagctggaagagatggggaaatatctcactgcctgcttttctatacctatcatgatgtgaccagactgaaaagacttataatgatggaaaaagatggaaaccatcatacaagagaaactcacttcaataatttgtatagcatggtacattactgtgaaaatataacggaatgcaggagaatacagcttttggcctactttggtgaaaatggatttaatcctgatttttgtaagaaacacccagatgtttcttgtgataattgctgtaaaacaaaggattataaaacaagagatgtgactgacgatgtgaaaagtattgtaagatttgttcaagaacatagttcatcacaaggaatgagaaatataaaacatgtaggtccttctggaagatttactatgaatatgctggtcgacattttcttggggagtaagagtgcaaaaatccagtcaggtatatttggaaaaggatctgcttattcacgacacaatgccgaaagactttttaaaaagctgatacttgacaagattttggatgaagacttatatatcaatgccaatgaccaggcgatcgcttatgtgatgctcggaaataaagcccaaactgtactaaatggcaatttaaaggtagactttatggaaacagaaaattccagcagtgtgaaaaaacaaaaagcgttagtagcaaaagtgtctcagagggaagagatggttaaaaaatgtcttggagaacttacagaagtctgcaaatctctggggaaagtttttggtgtccattacttcaatatttttaataccgtcactctcaagaagcttgcagaatctttatcttctgatcctgaggttttgcttcaaattgatggtgttactgaagacaaactggaaaaatatggtgcggaagtgatttcagtattacagaaatactctgaatggacatcgccagctgaagacagttccccagggataagcctgtccagcagcagaggccccggaagaagtgccgctgaggagcttgacgaggaaatacccgtatcttcccactactttgcaagtaaaaccagaaatgaaaggaagaggaaaaagatgccagcctcccaaaggtctaagaggagaaaaactgcttccagtggttccaaggcaaagggggggtctgccacatgtagaaagatatcttccaaaacgaaatcctccagcatcattggatccagttcagcctcacatacttctcaagcgacatcaggagccaatagcaaattggggattatggctccaccgaagcctataaatagaccgtttcttaagccttcatatgcattctcataacaaccgaatctcaatgtacatagaccctctttcttgtttgtcagcatctgaccatctgtgactataaagctgttattcttgttataccaaaaaaaaaaaaaaaaaaaaa

SEQ ID NO: 156 - DNA, 4254 bp, Homo sapiens
atggctgctgttcctcaaaataatctacaggagcaactagaacgtcactcagccagaacacttaataataaattaagtctttcaaaaccaaaattttcaggtttcacttttaaaaagaaaacatcttcagataacaatgtatctgtaactaatgtgtcagtagcaaaaacacctgtattaagaaataaagatgttaatgttaccgaagacttttccttcagtgaacctctacccaacaccacaaatcagcaaagggtcaaggacttctttaaaaatgctccagcaggacaggaaacacagagaggtggatcaaaatcattattgccagatttcttgcagactccgaaggaagttgtatgcactacccaaaacacaccaactgtaaagaaatcccgggatactgctctcaagaaattagaatttagttcttcaccagattctttaagtaccatcaatgattgggatgatatggatgactttgatacttctgagacttcaaaatcatttgttacaccaccccaaagtcactttgtaagagtaagcactgctcagaaatcaaaaaagggtaagagaaacttttttaaagcacagctttatacaacaaacacagtaaagactgatttgcctccaccctcctctgaaagcgagcaaatagatttgactgaggaacagaaggatgactcagaatggttaagcagcgatgtgatttgcatcgatgatggccccattgctgaagtgcatataaatgaagatgctcaggaaagtgactctctgaaaactcatttggaagatgaaagagataatagcgaaaagaagaagaatttggaagaagctgaattacattcaactgagaaagttccatgtattgaatttgatgatgatgattatgatacggattttgttccaccttctccagaagaaattatttctgcttcttcttcctcttcaaaatgccttagtacgttaaaggaccttgacacatctgacagaaaagaggatgttcttagcacatcaaaagatcttttgtcaaaacctgagaaaatgagtatgcaggagctgaatccagaaaccagcacagactgtgacgctagacagataagtttacagcagcagcttattcatgtgatggagcacatctgtaaattaattgatactattcctgatgataaactgaaacttttggattgtgggaacgaactgcttcagcagcggaacataagaaggaaacttctaacggaagtagattttaataaaagtgatgccagtcttcttggctcattgtggagatacaggcctgattcacttgatggccctatggagggtgattcctgccctacagggaattctatgaaggagttaaatttttcacaccttccctcaaattctgtttctcctggggactgtttactgactaccaccctaggaaagacaggattctctgccaccaggaagaatctttttgaaaggcctttattcaatacccatttacagaagtcctttgtaagtagcaactgggctgaaacaccaagactaggaaaaaaaaatgaaagctcttatttcccaggaaatgttctcacaagcactgctgtgaaagatcagaataaacatactgcttcaataaatgacttagaaagagaaacccaaccttcctatgatattgataattttgacatagatgactttgatgatgatgatgactgggaagacataatgcataatttagcagccagcaaatcttccacagctgcctatcaacccatcaaggaaggtcggccaattaaatcagtatcagaaagactttcctcagccaagacagactgtcttccagtgtcatctactgctcaaaatataaacttctcagagtcaattcagaattatactgacaagtcagcacaaaatttagcatccagaaatctgaaacatgagcgtttccaaagtcttagttttcctcatacaaaggaaatgatgaagatttttcataaaaaatttggcctgcataattttagaactaatcagctagaggcgatcaatgctgcactgcttggtgaagactgttttatcctgatgccgactggaggtggtaagagtttgtgttaccagctccctgcctgtgtttctcctggggtcactgttgtcatttctcccttgagatcacttatcgtagatcaagtccaaaagctgacttccttggatattccagctacatatctgacaggtgataagactgactcagaagctacaaatatttacctccagttatcaaaaaaagacccaatcataaaacttctatatgtcactccagaaaagatctgtgcaagtaacagactcatttctactctggagaatctctatgagaggaagctcttggcacgttttgttattgatgaagcacattgtgtcagtcagtggggacatgattttcgtcaagattacaaaagaatgaatatgcttcgccagaagtttccttctgttccggtgatggctcttacggccacagctaatcccagggtacagaaggacatcctgactcagctgaagattctcagacctcaggtgtttagcatgagctttaacagacataatctgaaatactatgtattaccgaaaaagcctaaaaaggtggcatttgattgcctagaatggatcagaaagcaccacccatatgattcagggataatttactgcctctccaggcgagaatgtgacaccatggctgacacgttacagagagatgggctcgctgctcttgcttaccatgctggcctcagtgattctgccagagatgaagtgcagcagaagtggattaatcaggatggctgtcaggttatctgtgctacaattgcatttggaatggggattgacaaaccggacgtgcgatttgtgattcatgcatctctccctaaatctgtggagggttactaccaagaatctggcagagctggaagagatggggaaatatctcactgcctgcttttctatacctatcatgatgtgaccagactgaaaagacttataatgatggaaaaagatggaaaccatcatacaagagaaactcacttcaataatttgtatagcatggtacattactgtgaaaatataacggaatgcaggagaatacagcttttggcctactttggtgaaaatggatttaatcctgatttttgtaagaaacacccagatgtttcttgtgataattgctgtaaaacaaaggattataaaacaagagatgtgactgacgatgtgaaaagtattgtaagatttgttcaagaacatagttcatcacaaggaatgagaaatataaaacatgtaggtccttctggaagatttactatgaatatgctggtcgacattttcttggggagtaagagtgcaaaaatccagtcaggtatatttggaaaaggatctgcttattcacgacacaatgccgaaagactttttaaaaagctgatacttgacaagattttggatgaagacttatatatcaatgccaatgaccaggcgatcgcttatgtgatgctcggaaataaagcccaaactgtactaaatggcaatttaaaggtagactttatggaaacagaaaattccagcagtgtgaaaaaacaaaaagcgttagtagcaaaagtgtctcagagggaagagatggttaaaaaatgtcttggagaacttacagaagtctgcaaatctctggggaaagtttttggtgtccattacttcaatatttttaataccgtcactctcaagaagcttgcagaatctttatcttctgatcctgaggttttgcttcaaattgatggtgttactgaagacaaactggaaaaatatggtgcggaagtgatttcagtattacagaaatactctgaatggacatcgccagctgaagacagttccccagggataagcctgtccagcagcagaggccccggaagaagtgccgctgaggagcttgacgaggaaatacccgtatcttcccactactttgcaagtaaaaccagaaatgaaaggaagaggaaaaagatgccagcctcccaaaggtctaagaggagaaaaactgcttccagtggttccaaggcaaagggggggtctgccacatgtagaaagatatcttccaaaacgaaatcctccagcatcattggatccagttcagcctcacatacttctcaagcgacatcaggagccaatagcaaattggggattatggctccaccgaagcctataaatagaccgtttcttaagccttcatatgcattctcataa

SEQ ID NO: 157 - DNA, 34570 bp, Mus musculus
  misc_feature (1)..(448): "n" at positions 1 through 448 can be any base.
  misc_feature (6032)..(6550): "n" at positions 6032 through 6550 can be any base.
  misc_feature (29960)..(29979): "n" at positions 29960 through 29979 can be any base.
nnnnnnnnnnnnnnnnnnnnnnnnnnnnnnnnnnnnnnnnnnnnnnnnnnnnnnnnnnnnnnnnnnnnnnnnnnnnnnnnnnnnnnnnnnnnnnnnnnnnnnnnnnnnnnnnnnnnnnnnnnnnnnnnnnnnnnnnnnnnnnnnnnnnnnnnnnnnnnnnnnnnnnnnnnnnnnnnnnnnnnnnnnnnnnnnnnnnnnnnnnnnnnnnnnnnnnnnnnnnnnnnnnnnnnnnnnnnnnnnnnnnnnnnnnnnnnnnnnnnnnnnnnnnnnnnnnnnnnnnnnnnnnnnnnnnnnnnnnnnnnnnnnnnnnnnnnnnnnnnnnnnnnnnnnnnnnnnnnnnnnnnnnnnnnnnnnnnnnnnnnnnnnnnnnnnnnnnnnnnnnnnnnnnnnnnnnnnnnnnnnnnnnnnnnnnnnnnnnnnnnnnnnnnnnnnnnnnnnnnnnnnnnnnccacagtttgagacatattcagtctcctttgactctgtttcccccacgagcctcctgtatcttctcccttccctccaaaccccttcttcccagtgaatcccttttctgctttcatgtgtgtctgtgtgtgactgcacatgcacacatgtgtgagtgtgtttagttggggtttctggcatgagtgtgggtgaggagttatttacctaaacaaaggcaacttagagtgtctaagtcagcactgaggactctaactcctccttctccggcagccatcgcctgcctatggcacctctgagagggacaggcctcatgaggtgacactatccatgccatacatgacatatattcacacatgagaggatttgatggacccagccttgtacagatctacagtgagttcatgagtaccataaccatgccatgtatggaagatataaaactcatagaaacgccttcccatagaacgccatcttacactctagccatccttccttctgagatgttccctgagtctcagaggtggtgatgctgcggtctcatgtagggacacttcgaccagcacatagtcaccacattcaccatcacctactacaaacaagagctagaatttttttaatttctaattttgagccccaacgtatcttatatatgtgaatccataaaaggaatttgcctgagtggccatcattttttgaaaggtgcagtttacgtgagcatgagcctttaatcctatcacttagggagcagaggcaggtagatcctgtgagtctgaggccggcttatctgcaagtgagttctaggtcggttagggttacatagtaaaaccctgacttaaaacaggcagggaggcaggcaggcaagcagacagacagacagcaaaagagtgaagtaggggagtaagaaggaagaaaatatgagtattatatatactaagtattctttataatgtttattatatgttgtgctggatagtttcatgttgatgacacaatctagactcatttgagaagagggaacctcaattgaggaaatatttccataagactgagctatagagacacttgtagggcattttcttatttaatgatgggcgggggtgagatggggggcacctctggcctagtggttcaggttctcaggctaaagaaaccatgaggattaagccagtaagcagcatcccttcgtggctcctgcatcagctcctgccttcaggttcctgcctggtttgagttcctgcgttggctcctctcagtagactaggactcaggatctgtgagcttaacagagcctttcctcctcacactgcttttgctgatggcactttaccacagcaatggtgaccctaactaagacagaagtgtatgcacaccaagcaggctgcattgaatgcatgtctcactgtggggcacagtcacagtgacaggatacatgatgtatctaacagggactaaacactcaattagagcagaggctgaagctgatcccagtggcagacacttggagtctcagcatgtaaaaaacagaagcaggagggatgccatgagtttgaggccagcccaggtaacaggcaacagcgtgagagatcttgtcaaacacacaaaccagaattacaaaacaaactcagagatatggcttaacagataaaggtactcactgccaagcccgaggacccaagtaagaactgactcctgcaaattgtcctctgtcctccacacacatatgtagaatgctcatgctcatatacacacacatacaaatacatacttgcatgcttacatacatacacacatatatgcatgcatacataatacatactacacacatatacatgcatgcatgcatacatactacatgcatacatgcatacacatgcacacacatatatgcatacatatggcaacaacaatatagagtggaaattaaaatagaccagcaaggtatccgaggcagaggcagcaaagtctgtgtggcatgatggaagtttcagctgttccagagttggccctggggacactcgttctgcgcaaagaaactggtgggttttgctagttgtgggaggtgctgtccttgttccagaaaggtctccattatataatgtgctctttgtgtggacaggccgagagctctgtgggatgggctgggaggtccagtgtggcatgctagctgtgtcagaacagggcactgactggtgtatctaagtaaagaggtccttgtggtgtagggcactggctttctgagtgttcttaggacatatgctagacccgtgactctaaggccagagtcaaccactcggctggggcccagacatcgtgcttgccaagtccttcaggccactgtgtcaagttcgagaaccgctggctgtctgaggcataactgtttggtgtttagagcatcttagaacactgggcaaagcctgctccttgatgaacagcagaagtgctgggtcctccatctggcctttaggtgctgtatctacaatctttctctcagtctctcagccttatacagcacattcacacacagctctcctgtgagagatggctgcttggcccttcatctcaagctccttccaccctgtaccacttagctgtgttacattaacctggtaccactgaaaatattctcaacacatggatagatacatatacaagtgcatccacaggctgtcctgccctccctgttagacacactgccccacgttgtctcttccctggccagtgctcacttagtactcatccgataaacacctgatccaggcatctgacttgctctccaggctgaggtgcccagatacacacatagtccctgtaaccttacggtaaccttggtgtgccaacccaacacctggcctgtttcctccctgcagactacttactacctggtacctaaagacagcagagctgtgtgtgtgggagttggctcccagcaatgacagcctttattgcccacttcctgtgttgactgtaatgtgcttttgggtcctgtgcctgagtgagctgctaaccttcatactgcttccactgctgtctgaagctcagtttccacgtctgtaatgtggtgataacatgattacacctaaaggctgttcagaggaggaaaggaagggagagtgtaaagaatttagcttgatgtatggaacacaacactaagaaacagcctctggaggggttagccatagttttcccctgagacagtcaggaaagtacaaatcctttgcaaatcgtgtggccttgtgcggagttaggtttgatgcctatggagctgcctccagatgctggctctctaaacctttctcactataatcatgagaagaagaaaagaaggaggaggagaaagaagaagaagaggaggagggacagaaggcactgtttctctaccttccagtccccaactatggcaggcaccatgccactaacttctaacacagatgttttgacagttttgtatgaagagtgaatgttaagggttgggcgggcagcctgatatactggcctagcttatgggcaggacttggtttgaacccctggtcctagagggggaaaagagtgtgttgggcatggtggcgcatatctatcaccccagcattccagagccagaggcaagtgggtctctgtgggttcaaggccagtctcctttacacagtgagggcctatctggaaaagaaaaagaaaaagaaataagacggacagacagatacagagtataaagactgagaaaagctaaagttgagagacatagggctgtgtaactgttgaatgctgtaaaaattcaaggttgattttccttaaggacttagaggggccctactcttcctgaggctaatgagctgtgaagtgttactgctcaccactgaaagagacccagaggaagaacaacgaggtctctgcccaggaacagagaagagcactcccagttaataaaaggctgaggcagaggggacccattccctccagcaacgctctaagcctctgtggcacaagttaatttctctgtgggtacaagtgattataactagcagctggaacaaatgaaaatgaaatacaatctattaacagcgaggcataattactgagaaaattccacctgagctggggcttaagcagccacccacacctaagccagacacaaatctggcaaagccaccactggtcacttcagtgagaagcctggggtagaataattcagacttgagaaagctgtccacagggtagaaattgagaatcagaaacaaactgcaaattgaaatgtaatcttggctgtcttacctggaagcacccctaccccagctgactataacagaaaattgaaacctctgccttcatctcttttaagtcaaggaccacagcataggcattgccttctccatcctggagaagctactctggttctatgggcttgaaggtttcagttaccatagcaactctctgcaaccattagcctacaagagctaattttggctcacagttttggaggtatcagtccatcaccggttaacaccattgcttggggcctatggtagcagtatgtggcagaaccacgtggcagaggaggccatctgtgtgacgtacggatgatgctctgaggggatccctggaacccaaacgtccctctgctctacctctgcttctgtttggagcttgggtctacgaggcagtgtcttgccccaaacattcaggtcatccaggatggccctaaactcacagacatccttttgcctcagcattctattatctgtgttaagatagaggggctggagagatggtttagtggttaagagcactgactgctcttccagaggtcctgagttcaattcccagcaaccacacggtggctcacaaccatctgtagtgggatctgatgccctcttctggtgtgtctgaagacagcaacagtgtactcacatatataaattaaaaaattattaaaaaaatattgcagataacaccgggtgtggtggcgtacacctttaatcccagcactctggaggcagaggcaggcagatttctgagttcgaggccagcctggtctacaaagtgagttccaggacagccagggctatacagagaaacccaatcttgaaaaatcaaatatatatatatacatatatatatatgtatatatatgtgtgtatatatatatataacagatagatgttcctccacactgctttaagccccatctctttatttattgacctatatatcttatttatttttattattgtattagtttgtttctctggtgctgtgataagatgggaggaaagggtttatttgacttacacatcataacccgtcatccagagaagccagaaccttgaggaaggaactgaaataaagaccaggaaagagcgctgtttgctgacttgcttccaggctcaggtctagctgccttttatacacctcccaggaccatgtggccatcgctggctcagcacacagtgggctgggctctcccacatcatcagcaatcaagaaaatgtcccttggaccaggcagtggtaacagacacctttaatcccagcactcaggaggcagaagaaggtgaatctctgagtttgaggccagcctggtctctcatctannnnnnnnnnnnnnnnnnnnnnnnnnnnnnnnnnnnnnnnnnnnnnnnnnnnnnnnnnnnnnnnnnnnnnnnnnnnnnnnnnnnnnnnnnnnnnnnnnnnnnnnnnnnnnnnnnnnnnnnnnnnnnnnnnnnnnnnnnnnnnnnnnnnnnnnnnnnnnnnnnnnnnnnnnnnnnnnnnnnnnnnnnnnnnnnnnnnnnnnnnnnnnnnnnnnnnnnnnnnnnnnnnnnnnnnnnnnnnnnnnnnnnnnnnnnnnnnnnnnnnnnnnnnnnnnnnnnnnnnnnnnnnnnnnnnnnnnnnnnnnnnnnnnnnnnnnnnnnnnnnnnnnnnnnnnnnnnnnnnnnnnnnnnnnnnnnnnnnnnnnnnnnnnnnnnnnnnnnnnnnnnnnnnnnnnnnnnnnnnnnnnnnnnnnnnnnnnnnnnnnnnnnnnnnnnnnnnnnnnnnnnnnnnnnnnnnnnnnnnnnnnnnnnnnnnnnnnnnnnnnnnnnnnnnnnnnnnnnnnnnnnnnnnnnnnnnnnnnncatgtgtggtgcacagactaacatttaggcaaagtactcatacacataaaataataaaaataaatctgagagagagagaacaaaggaaggaaaggaaaggaaaggaaaggaaaggaaaggaaaggaaaggaaaggaaaggaaaggagaaaagaaaagaaaagaaaagaaaagaaaagaaaagaaaagaaaagaaaagaaaaaaaattgttccacagacttgcttacaggtccatctaatggagacagttcaactaaggttccttcttccaagttctgtcaagttgacaaccaagattagtcatcacaattacattcagtgtaagtgtgtgtgtgtgtgtgtgtgtgtgcatgcacacgcgcgagcaacacttatgtggacgtcagaggacaacttatgggatttggctgtctccaaccatttgtttcctgaggcaggaaaggggaggggaggggaggggaggggtgggtcctgactcttcctgacattccctctgagtctacaatgcagcctgagaatcactgaaggtacaatgattgagaatcctcaaggagacagccccagatcaattccaggctccacccacctcctcacattgccatcagcatcaccacacccaatgctgtgtccacagtgcaccacacacggcacaattctttctacacactttctcatgcagtcctccatctctctctgtctctctgtttctctctctgtgtgtctctgtgtgtctctgtgtatctctgtttctctgtctctctgtctctgtctctctctctctctgtctctctctctctgtctctctctgtctctctctctctctctctctctctctctctctctctctctcacacacacacacacacacacacacatctccctaatgtccagcttaggtcctacttccacacagtcttccccaacctttgaagtgtctagctatatgaagtaagatgctggttttgattttatccttccaagagtggacttggttagacctagggatggctttttcatgttgtcatcacatccacagatgacaagtttcccttcataaaatccaatggtgggttaggaccaacaacgtgaagtccattaagcacgctgccaagggtagaaggcactacagaaaaggtcacgctaattgcaactaaatatgttcagagtcccgaacaaggaaactcgccttcccgtggtttgtccttgtcacaggctttctggaccactgacaggaaatcacctaaggtcaaagcacaggctgataaggcacccagaaaccagctattcgaaaaatagttgaagacattaggatgtgggttgggacacataagactcacaggcacatgatatctgtacccagaggtcacttgggagacatgctacctacacacacggtcctgtctgaggcccagctgggggtgtcatagaagatacattttgactcagcatgaaggctcaagtttctaattctaaacagtaaaccatcctactctgaaacatgatctaccctcccccttcgcactttattttatggatgggtcttatcacatagacatctttagcctcaaactcagaatcttcctgcatcatcctcccaagtgctggggtgacagacattcaccctcacagctgaggaaccatgatttcatgaggcagctttctcccccttgagtgaggatgctttggtctcctttcttgcatcctctggagaggaggggtgggcagagtgaggcgtgaccggcttgtctttcaaagtccctttccattccttggaatttctcatgctttggtcttttctggacagtgtgctcagagcagcaaaagctgacttgtgtgtgttgctgggcaggaggggcgtgaccgcatggtgtagggttggaaggatgaacagtgcttcgtcagctccagactcaggaagcgccgaggcagtgtatccctgagcagtacaggaccagaagagctggagaggggctccaaccctgtgccctggctttcttcctccttaagaacagttttgggggccagcaagatggctcaacaaggaaagacatttgccaccaaacatgactacctgagtcccacattcccacattgtaggagagaaacaacttccacaagttgtcctctgacctccataggctctctctgtgtgtctatatcgttgtctgtctctgtctgtctctgtctgtctctgtctctgtctctgtctctgtctctctctctctcacacacacacacacaaatagtgccccgtatgtagtacctacatagtgtagtgggtacaatcttacactatcatggactaagtcaggaaatatcctcccacggaagaaaacccaccaggacaagacctggaggggaaatggatcaatgtccaccacaggtcttcatgaacgaagtggctctcaggatgggacagagcaggggtggagagcaggggcagagagagcctgcagagcagctatgatggaagcaggggatgacaaatgtggagtcaggacacttgggtgcaaggttaccaccattgatgcgttacaggatcctgggtaggtcagtctccatctctgggcttcggggtcctcctgtgtaaaattggagctgtgggggtggcctaggtaaccatccatgtcctttcaagctaggtgtctacaagtttacttgtggtggaacgcctttttgacctttttctctgagtcagagacagctcgatggccatatttatactgcactcttgtctggtaatttcattttacattttttcttctagtattcttagggttcttccctttgaaagaacttaactctttcaaacttgagctgaaaagagggaggggcagggttccccctccctggccgggcaaaaggatggcagtcacaggttgatcaagtgccctggctcgcctgggactgaggggtttcccaggacaggggactttctttggttctgggcaaactgggatggttggtcaccctagtgataaggaaagtgagtgtgtagaggaggctgggagtactcttttcttagccccttctatgaggagttccccaagtctatatgcatccctcatagagatccagtgagcagaagggaggggcagccttcacaccagacgcctggcccagttcagaccatgagtgccaggaaaggcactgaaatgcttgcgtagtactgactctgtggggggagtttccctttttcttaaaaaaaaagaaaagaaaagaaaagaagggggaaaacacacacacacacacacacaccagaaaagactcagtggaaaaaaaaaaaagagatgagtcgagaggcaagcagcaagccctcactggccccaggagaccgcacatggctcatttgtttaagtttgcagctgacgcctgccacctctccataggcaccagcacaaaccttctcgacatcagacagtgaccagcctggtgacgcagagctgcagctatgaactacccactaaccctggacatgggctccatcacatacaatatggatgacctggtgagtcgagtcatgtggctccctgctgctctggtcctgcttggaactttaaatatactatgtcaaggaagaggggatagcttgggaatcccgccgcaaggattatagaacataggcaaatacatccacttttagactcttattgtctcccatatctgttgcccttaatagatgccaaagggaggtgggagacacaggatcaggtttggcatctcctgctgtgtgactgaggacccagctctgcctcttgcttctttaacagagaagtttatcttgtctccctgagttaaaatggcaaagtcatttggaaggggtatttttgtttgctgcttttttttttttttttttttttttgagactgagcttctctgtgaagcaagcattggctgtcctggaactctgtagaccaggttcaaactcacctactacctgccaagtactgagattaaacgtgtgcgctgccactgctgctgccgccgctgccaccaccaccacctggctggaagttttcttcatgtcagtttgctggcagtgctagtcaatcaggcagtgtggagttgttggctgggagaggaggggtgggcagagtactcagttggtagagtgcttgccgagtgtgcatgctgctaggctcatcctcagcttgcacagagtgtggtggtacacacctataatcccggcatgagaaaggtggaagcaaaagactcaggggcgggagcctagaacacattgagaccttgtctccaaaagaaggtatatataattgttcatcttgctgaatgacttgatcattaaggcacaatacaacatccatctgtgttgggtggagagactgagaacataatctttgccctcaagtcgctgatggtccagacaaggtggagctaatccctggctggaaggctttagacagtgattttgtatagatgaagaaagcatgaggccagacgtggcaaggaagaggatcccaggggtcaaagtcatgcagctgtattgctcctaaaaacaccttggagcatgtcactttgccctgggagggactgtcatctctagagacacagtatcttggaagagtttcttaggtgggagcttaagaaagaaacaagcaaagaaaggaagcagtgcctggcaccctctccgccccccgcctgagtgtcttccagttaagcataggagttcacttgacttggctgctattgaactaccaaaggatgttgttaggagcacttcaagtggaaaaacccagggctgtggggcagtgggttatgggcatcagtagacttagaaccttcatcatgaccttattctctatgaactccaaacccagagccctatcagctctcctgccctaatcacaccttgaggtgtttccccccgactctcccagctcgccaggatctgtggtctgctttatcattcttcccactatgtcgctgggcttgctgaacctgctcagctggcatcacttgggcactcatggggattctgcaaataaaaggacctcaggcttggctcaatgctttctgttgttgtcttgaaaaaatttggggggtggggttgtttgttggcttgtttgtttgaaacagagtctctgtgtagcctaaatctgcttcaaactcatagtcctcttgcctgagtcctttgaaaacctaactgttctacaggggagtgtgctcccacgcttgcttgccctcatccccactgccagctgcccctgatatggttaggtggtatcttctgccctcaagctgaccatcagccctgacccacttggatgcctttgtaaccacctggagacctggccgttcctggcttctgagaaacctcaagagtttcccctaactgcacgcctcacatcacagtgtgacctactagagacaggtggtagtgggggccagagggacagcaggacgtgctcatgacatgaagcaaacctacattccaaggagagaagcaaggtaacttctttcatgacacatatcaaacccaaggccctgagctatgtgcccagacatctcgctaggagtccaggggttctaagacaaccctgtccctggagtccttcaatcagacacgttcttccttcacccaccacccactctcttcaagggtggttgtcactctgaaacacagatcctcctctttggccccactcaccttctaaaaggccatgaccggccttggcatactgccctattctgtcatagcatgcatgtcctggaaagacagaactggcagaaaagtttagcattagtggcttctccataaaacaatgggtttctgttttgctctgtctgtctgtcatactggacaagacagtatgacaaggcctcctgcatccccagctctcccaaggagcacttcctgccctgtgacagacacttggaaggactgcaggcttggctcaatgctttctgttgctgttttaaaaaaatttgggtgggcgggcgtgtttgttggcttgtttatctgaaacaagagtctctatgtagctaaatctgcttcaaactcatagtcgtcttgcctgagtcttttgggtactggcattataaatctctgaggtcttagcttgacatttttcttaggcgtctgctgagcttctcccattgactttattttctgctcctcactccctgtctttgacccagctgattactggcccacttctccagatcagaaggttcaacactcccaactctgagttctgaaacaacagtcttgataagtcaaccatcccttgtcttaattttaattttctttttacatttgtttatttatagtcaacagaggataacttgtaggattcagttctttctttccagcatgcgtgttctagggacttaactcagctttttaggcttgatggcaggtgccccattaagtgtctcaccaactactctttttattatttttaatgacaactgattttgagacaggatttttttcccctttgcctttttgagacagggtttctctgtgtagccttgccaatcttggaacttactctgtagaccatgtcgatcaggctggcctaaaacttagagatccaggttggagagatgactcagtggttaagagaactgacagctcttcctaaggtcctgagttcgaatccagttaaccacatggtggctcacaaccatctgtaatgagatctgacaccctcttctggtgtgtctgaagacagctacagtatacttagatataataatgatacataaatctttaaaaaaacaagaaacaaaaaacttagagattcgcctgcctctacctccttattgctggggttaaaggtacgcaccaccactgccatctgagacaggatttttctaagtagttcttcctgtccagaaacttgctatgtagattaagctggccctgaactcagagatctgtctgcctctgattttcaagtgctgagattaaaggtacgctccactacaccctgtccatgtagaccaggctggcctcgaagtcagaaatcctcctgcctctgcctcccaagtgctgggattaaaggtgtgtgccaccactgcccggctaacagcgaatttttaattgttgttgttgttgttattattattattatttattattattattattttgtgtgtgtgtgcgtgtgtgtgtgtgtgtgtgtgcgtgtgtgtgtgtgtgtgtgtgtgtgtgtgtgtgccatgtgagtggaggtcagagagcaacgtttgagaattccttctctccttcttccatgggttccagggagcaagctcatcatttgtcagttgtcaggcatgtatagagagcaccttttcccatcgaggctcttttgtcccttgaactcaaagatcacctttgatctcccacacacttgctggccatgggcagctactaaacttcttgatggctaagagccaggagaagaaccctagcacctagagtaggcatggccagaggtcaccccactctggcgaggtgggccctggtggccctggaggagatcctgtccaggagaaccaccatgagttctttcctgtcactcctcaaatcagaggtccgtggtggggcttgtctggaacccacacagactagttctgaaataaagttctaggcgtcaggaggggaggctgccatagaacagggtgaagctggtctaagtctcgcttccctgacctttcctcatagacgatcaccaggagccatgaactcattgtgaccagagcatcacaggtcacagtctgtccacacacaagtgtctcagttcagcaagggagttaaaaagaggaaccaaaactcgctcaagctgtttctgggctttacctgagtggaggggagggtccccccgttctaaccacgtgaaaagtcccacagaagccccgttagaggaagcctcaaccgagggtaactggagggatcagaaatgaggggaaacctgaaaccagccttcgaggggttgcattagggagaatataggttctattactcagatatcacagaccgcattaggaacatatctctttataagagacacggtctgcctgttcttattcctttgggggacacataaaaagcaacaggtatttgggatgcgaagtcagaatacaggaatgagtttcttttgggaatgaaagacaaagtatttcaaatctacaccatcccagaaggtccagcaagatggttcagagggtaaaggtgcttgctgccaaccctgacgacctgagttcagtcctgcgtctcatatggtaaatagagagaaccaactctgaagttgtccactgatcttttgaaatttccacacagagataaatataataattttttaaaatttaaagcaagtgttatctcaggaggcagctttaagaggttactgggagattcgtgtgcacgttcctcaaatacatgaccccatgttcacagtgtagacagccattggttctcaagatgaactcattttaaacctaaagacgtggcaaagcgatagttcttccacgtttcccccagagccaagcatgacgccaatgactaagcatttaagagattgaaacagggagggtcataatgttcagggtatcctgagttcaaggctagcctgggctacacagtgatatcctgtttttaaaaactacacactggggctagagagatggctcagtgactaagaacacttgctgttcttccaagtttagtttccaatacccacatctagtctgatgagctcttctagcccccaagaacacacacacataagtggcagacacacacaatatatatatacacacacacagaaacataagtaaaataaaaagaaatctctttaaaaaatctaaaaatcaaaagcactacatactcctaatggccaaaaccctcaggcagagatggaagaggacccagtaggtttgctcctttgggggaaaagaaggacatggggcacatgacaaaccagagtcctgaattgtctttggggaattctgaaagaagagtgtgttgagaagaacagatctacacacacacaacccagtctcattcctatagactgcaccctgcaagttactgaaggctgaacttaatagcctctcccagatcccaactggtggctggaaacacttacgtaaaaggagacataagctcagcagaacctggaaacacaagcctgtaatcccagctactcaggagactaaggcaggagggttcaaaattgaagacattgcctacagagtgagttcaaagccatcctgggcaacttagtgacatgacactgtcttaaaacaatgagtaagggccaggtggtgcctgtgcacatctttaattccagcactggagaggcagaggcaggcagatctctgagttcgagaccagcctagtctatagagtgagttccaggacagccagggctacacagagaaattctgtcttgaaaacacaaataaggcctggagagatgactcagcagttaaaagcattggctgcacttccagtgatcctgagttcaattcccagctaccacatggtggcccgcaatcatctgtaatgggatctgatgccctcttctggtgtgtctgaagacagctacagtgtacttatatacataaaataaatattttttttaaaaaaatctacatctgttttaaaaacacacaaaacaaaacaaaagtaagtaaatagttatgctcttttgctatgaaagtatgaggattcaagttcacatacaagaggatccctggagggctggaggaagggctcagcagttaagagcaccggatactcttccagaggtcctgagttcaattcctagcacctacatggtacaaccttatataactccagttccataggatccaacactctcttctggtatgtgcaggctcatgcatatgggcacagacatatatgcaggcaaaacaccagtacacatgaagtgaaaataaagtaaagaagttcatttaacacttgggaggcagaggcaggcggatttctgagttcaaggccagcctggtctacaaagtgagttccagggcagccagagctacacagagaaacaccctatctcgaaaaaccaaaaaccaaaaaccaaaaaaaaaaagttcatttaaagggaggggggatactggcactcagtggtcagcaagtctacataatcagtgagtttaaggttcagtgagactgtctcaacagataagatggagaatgctgggagaagacacctaatatctacctctggcctccataaacacacacacaaacaataccccccccatacacacacacacagtcacagtcacagtagctcagtggaagagcacttgtctagcttgcaatattgctccacagagaggagcctgggggaacatacaccgggcaggaagccctgtaggctcctcagggggggattagggtgggcctgtgggcaagagaagcagagactgctgtgggaggggagctgagaccatgctaggaagcaactcaaatctgtccacacagggcgtgacagacaaccaggacagcagtgaacagcagactcgagaggcaggggtgactttcctgacacaggaactcttcccttgcacatgagttcaaagatggtggatcactgtgcctgttagaaagttgtccctccatcgactggagctacttgggagcttctgcccagtcctgctctatacgtgaggctcacatcggagtctagctgtctcctccgaaccaaaggcccttcccagcccttgaagacagttcccataggcttcaggcttctttttcctatttcctacgttcatagtacctggaaatgcctttccagggagggattttccaaacctttcaacagagccaactgacctgaaaaagagttcacctcatctagaaaaagcctatgacggcctgaacgcgcaaggaaggtgtgtgtgtgtgtgtgtgtgtgtgtgtgtgtgtgtgtgtctgtctgtctgtctgtctgtggctctgtgtatatgtgtggtgtttgagtcagggtctaagtatgctaactaggctggtttcaaactcatgagctcaaatgactcgttcgactcagcttcccagctaacagagactaccggctacaccccaacccagctctaacttgccccctgcaataattctacctggtgaatttgggttccccatctctgcttatgaaggactctgcattgttagtgttctccagccacaccccatccaaagcatcctgaattctagaagaaaatccagggtacatccttaaggaatgttccccagcctgctcccagagaaatccagtcagcaaaccctcacaggctgcctgctagacaactcgaagaaacacacacacatatcacacacagagagagacacacagacacagacacacagacacacagacacacagacacacacagacacacacacacacacacacacacacacacggctagacattttgcctgtcccagggagagaccccagtcttgtgtagagggaagaggagcctgtgtggatcccaacaggaagaacactttgcgtcgcttacttcttcttcccacccaacctccaacagcaggaccagcttcccatcctcctggcccagagcccacagtgctttctaaatacatccctagcttatgtctggcatcattccaggcagcatccgttcccatgggacatgcatccctagagcttgcgtgtacgctgtctgtgttctgtttcagtgcctgtctatgcagcagagcagtgtggtcccacctgggcatatgtctatgtctatataggatgtgtgttgcccatcatgtgtacccacagtgcgggtacacatgagggtttctgctgccttttgtagccaagaatgagggagccattcatcccatcgctgacaatgcactcttcccagtgtgttagctaggccagctccctttgacagcatctttccaccaggccagagccaaccctacctaaggcttctctctagggtttgatggagaggagaagtacccaagctcctgtgtatggggagtggctttaacacttgtcgagcttcaaaaatgtttgacaccttctgttgatttataccacactagcttcctcccatcttctcctcctctgaagactttaccaaaacaatacctgttggcatggaggaagagacagaccctcacccccttacctgtcccagtgggaatatcgcactgattgaacttcaagtggaaaggaagttcactagcctagataaaaacttgagccgttatcatgaaaggcctttaggccagacaggctggctagactcacatgctcccctagataggttcggctgttaccaaggtgaatcatcacatctccaccatctgcctgatgcctgtgctcaccagttcaccccacagcttccccctccacctcctactgcagagtcagagtcaaatagctctactcagttctactggaaacaactccctaaagggatagagagcccaagttagactccagaggcagagtttacagacagatgcaaacgtgtaaatccctgctgagccccagatggagtcaacttgggggccttgaaggaaggcaagagtttagagaggtggacttgaaaaaggagcgaaggtgacaggaagctgcctgggttgctggggacaggtggctgtggcacacatacctgaggaatagcatgtctggtgcagtgaagtcgtaggtaaggtctaatacatcaaaggagtgtacatttgggagaaatttatttttgcagggctgaggctcaaactctgggccctgtatatgctaggcaagcatctacctgctgagatgcactgccaggactactttagataaaaatgtaaaggccttctacctggggcattgaagccctatctaacaggtctattgttttcaagagttgtagggccattctctctctcacaggctgtttttgcacacgctaggcaagggctctactccaaaaatgtttgtttgttatagagacccaagcaatacttgccagcctggaactcatgtagatgaaactgtctttgagcccttcatctcctggctcttctctctagtgttaggataacagcctgagccaccatacctagccatatatataaatggttttactattgtatacgatatcagaaaaacaagacaaaagacacctgtttcttacaggtgatggggagtcattaaaggacactagatctatagggcctagttaggtgtggttatttgacctgtgtaggtgtagatttggtttgtttgtttttgagacatagtctggctataccgacaatggaactcaaatcgtgggcttaagccaccctcccccctcagctcctgagaagtgcagggctgggatgtgagtacgaggaagctccccctgtccactgggtaggaagtggaaaagaacagaaacagtagttagaaaaggacccataaggccggagcgaggctccaaggtcaagagcacttgctactcttgcagaggactggggttcaattcctagcacccacatagtgatttccaccatctgtaacctcagttccaaggaaaccagggccttcttctgacctccatgggcactaggcggtacatgcacacatacacacaggcgcaggcaaaactctcatacacggaaaataaaaaggtttgaagtctaatttaaaaaaaaaaatgaaagaaaagtaaggggaaagacccatagagagacaggatgggggacaggataaggtgacggcagaagaagggacactggagagtgggtagatagtgctgccattgtaccatgtgtccccatcctctctgaaagagccacctgctctagggaccaaaagaccaagatggggaatcagtttacccatcaggggaagtgagtgtgtcacccacaacagtgtgcctggtggcaagaaagatttaaggtaaccatgaaccaacccctactggcaggagcccctcactctcctcaaagggggtcagcacagagatgagatcgccagagcctagaggacagaacagcccactgtctcttacttccctggggcccatcacttatatcactgtgttttgaacccatagtagttcgggtgtaattggttttgtattgcccagggaggaggttgaccagggcagggcagggcaggaagaacagagtaaggagctgaggaaacgcaggtgcagggcagctgtgagtgaaaggtatgaaaacaggcaccctgtcttcctctgtggttagcaggcaaacaacctgagagctggggtgatggagggcagtggcagatggggaggaggacgcggaggtagggacttccggagatataacaggcacgcccccttcttttccactcagaaaacgcttcctccctaccctgcgcctagtctccctgtgtgtgactcatatttgcctccgctgctgggttcctgtgcctagggagtttactctctgcttgggaagtagctggaaacttaggctccgcccctttcccagaagcctttggagggaagtgtgggtagtagctctcattgtagcgttattgattgactaaagacaggcaaacgtgcctttaagcaaacctcctctttgagcaagacaggtctgtaaaataagaggaagattacatacctcaagcgtgtgtggattaaaccaaataggaggccatttcctcagtttcagcaataatcaagacaggaagaaggggagaaatttagaggaagtaagccagctacatcagcactcaaccattccccacccccagtgagagcttagatttactacccactgtccttacagaattggaatattggcttcttgttcctatcaggttccattcccaaatgtcagtactgactgcaatccctaagccttccatctttaagaacaccctaccactttgtgagtgactactggtccagtttacatacaaacaaacgaacaaaaacgaaagaaaagaagagaaaagaaaagacctgaagtttcaggccagggatgtggctcagtggtggaacagttgctcagcactaccaaaaattagaataaaaaattatatttaagagacagggcggggctggtgagatggctcagtgggtaagagcacccgactgttcttccgaaggtccagagttcaaatcccagcaaccacatggtggctcacaaccatctgtaacaagatctgactccctcttctggagtgtctgaagacagctacagtgtacttacatacaataaataaataaatcttaaaaaaaaaaaaaaaaaagagacagggcatgggggcatgtgcctttaatcccagaacccagcaagcagagactacccaaagctcaggtcaacctggtctacatagtaaattccaagctagccaaggctatagagggagatcctgtctaaaataaatatgcagaagggaggaaggagggtaaagatggcatgtttaaggacaggccaagaggaaacagaatagtacagacaaaaagcattagcctggaaggacaggaaacctcacaggtggcagcttcctctcagaggaaaaaagaagaagaagaagaagaagaagaagatatggctatcgttttcatttctctttcttttggtccttacagtacaaggaactggccttctacagtaacagcacggagattcccctacaggacagtaacttctgctctacagtcgagggacccttactgacgtcctttaaggcggtattcatgcctgtggcctacagcctcatcttcctcctgggtatgatgggaaacatcctggtgctggtaatcctggagaggcaccggcacactcggagctcaaccgagaccttcctgttccacctcgcagtagccgaccttctcttagtcttcatcctgccttttgcagtggctgagggctctgtgggttgggtcctagggaccttcctctgcaaaactgtgatcgctctgcacaagatcaatttctactgcagcagcctgctgctggcctgtatagctgtagaccggtacctagccatcgtccatgctgttcacgcctaccgccgccgtcgactcctctccatccacatcacctgcacggccatttggctggccggcttcctgttcgccttaccggaactcctctttgccaaggttggccaacctcataacaacgactccttaccacagtgcaccttctcccaggaaaacgaagcggaaactagagcctggttcacctcccgtttcctctaccacatcgggggcttcctactaccgatgcttgtgatgggatggtgttacgtgggcgtggtccacaggctactgcaggcccagcggcgccctcagcggcagaaggcggtcagggtggccattttagtgacaagcattttcttcctctgctggtcgccctaccacattgtcatcttcctagatacactggagaggctgaaggctgtgaatagcagctgcgagctgagtggctatctctctgtggccatcaccttgtgtgaattcctgggcctggcacactgctgtctcaatcccatgctctacaccttcgctggcgtaaagttccgcagtgacctctctcggcttctgaccaagctgggctgtgctggcccggcctccctttgccaacttttccccaactggcgcaagagtagtctctctgagtcagagaatgctacttccctcaccaccttctagatcccggaagtctcggggcccctgtctgtttctgttttccttgggaggataaagtggtggcggaacccatccaactcgagcttgggccagtgtccccagatgggaaagctagataaactctctcaaactttcccaaaggggaaagcagcccaaaggcaaagcaagctatatccaggccacctgtatcaccttagatgaagagaactccatacacctcccatcctaaccagctaaagctaagctcagctttatttcttcctggccatagggacaaccacctctgctgtggcccacagtctcatcttcctcctgattatgagcccagactctcctcccagaatgtattccatcatcttaaagactactggctgccacagctacccaccactcctataccacagaggaatagccagctggcggcggcagactatggccttaatgtgcctgtctcataaatacagacttcatgccagaccttcaaccgtgcctttctcttaaccaagcagaaagctgaaaccgatctactttaggtagctgtctggttccaacctaaccagcattgggtcagccccatgttactggatcttggattacagactgagggcaagttccagaaggttctggaagctagccagtatcctaagaagagtaaagggcaagccagcaggaaagaggcccagtggaaaagtggaaagacaccttttccaggctctaaggaagaacaagtaaaaatcaaacccagctgtcttctccacccaatgtaccaaagcttacagactggtggggaaatgagatccagggccctcgtggattctacgcaccaatggggaaggaagccaacttgcctggggaaagcaagatagcaaagtggtcctagcctcgagagaggggacacctagctaagagaatgacgacagaggttcctgtcttcattaggcagaggcaatataagaagccaacctgggcaggcaagtcctcaaaccccaggaaggcagtaccctgcccctgggagggtaccactcacatggaaccagaggaagctgctccatgcatacataggggaagttagcaggcaattctgagctcggcttcctcccagccaccgatctgggggcgtgggggtaggaagcagagttgcctagtaccactcaagccaaccgtacaagctccctgggggatcccactggggaaaccaatgctatagcttcagagactgtatcctcattgcagaaccgtgaagacacctggggacccccttttctgctcccagcatccaacaaccagctgggaagaggcaaaccgggcacagaaataaaaatgcaagagatggcatttttgaattttctctttttaataaaaaggcacctataaaacaggtcaatacaggcagagacccccggaacaagcctaaaaagtgtttcaaaataaaaacaggaagatgtcttcacatattgtatttatatatttatattttatatatatatttatataatggtacaaaatggctggggtatggccatggatggagggagaaggctggcctgtggagatcaccttgggaagctagtggtagaggtgggagacgagggcacaagaagagggcattgggccctttgtggccggagccctctccttggagcagggcaggctagacagtctgggcagggtagggatgtgggtgggggcacaaggcccagatggaagcagggagggcagtgtctggcaggaaggacaggtttccacccacctctcaacacaagagaccttggctatggtccctgggaggagcaggggaagccaggggcctgcagccagctctggagggggcttggtgcctggcctggctgatggtggacagcaccagactgggagaagtgggcacaaattccctttgtattacagctgccaaggcaaaaccaggccctgcaggtcagaaaggctggggacagggccctggtaaaagacaccctgtctagaatggcccttggccctggaggcaggacaggaaaggccttagccagggagctgcccgccaccttacaaggcaggaaaggacgtgagaaaaacagaagtagtttactcctggggccaaaggggacaaaacacccattcctgtatggcttgagtctgaccaggggcgggtgaggggctctcctgggaagtcagaggagaggcagtggctgtgtctggtgggcatagacagatctggtgcatggccctgagccctggacagaaggaccttgcagagagtaggcaggcagaggaggcaacaggatgttctcgctcacactgccttccctcgctcggcactagaggtggagggccaactctgtaccttccttctttggtgagaagcaagtggtggtttctagaagagtccatgccctgaagggttacctggcccatggctactgcagccagggtcccagcatcctaacccctccatagctccattctatggggccacacgctgccccttccttctcgccttttatcctagaatggggataaagggcttcaagttctggctaagatgtagcagcagaggcacccaggctgggggccctatgtcactggtgtgggtaaacacatgtacatgtgcacacctgctctccggaaatcactcagcagcagacaggcggccgtcgtagagggacgggggtagattctcagtcctcaggggctcaccaaatggaagcctagatggtctgatatcattttataggtggggcttatggagggtgcataggactgtatgtctctgggtccagaggaatgaagggtgtgatcatttgaaagaggggggaaggtttttttttttctcaatcttttttttttcttgtgtgtgacttctatcaagacacagaaatacggcacacgcacaaaccggcacaaaagcccagctctatttacagctccgctggcacctgcccacctggccagctgcctgcagggggcgtgggagaggaggtcagccacgtcagtagggaaaggaaatgaggcagaaggaaaacagggtaaaagcagagagacgggaaggcgagaaacggacctgaagcgccgccggcaaggtgacagtccacgacgggtcagaggatggaagaccctcctctctccccaaggacccccaaaacatagctgaaagcggggaagtgcaaagacaaagggagacagaagctccacgggaaaggggggggggggcagaggaggcgcagtcctagtgacagaaatggagcagagcccgattccaactcctcacccgacacttgccgcttccccctcagctgccagcacagcaggtttccacaaacaccactccccacacaagcccgttcccacccgccaccctacccctggacccaggccatccatcccaacactggaggaaaaacaaaactttttaaagttaacatattttcagtttccccagccccagaccgaggggcctgctagaagggtagattggccatgctgcccggcgttggcaggtagcccatctggctgtccagagacacactgcgctgacgcagagggtgggacaccatgaggttctgctggggtggggggcccatgagggagccctgtggggagagcatgtgggggaggctgggtgtagacctcgcccccccacacccctctgcttcatcagcataaaattctgctgggtcatgaggccttgtggaggggacatgaccccctggtgcaggccatggggcaccatgccctgttgtgggggcacacctgtcctgcccagcaaggacatctgtccagggtggcacatggacatgctgagcccccgctggaccccctgttggcccgggaggttggggggtcgagacggggtctgctctgccatcatgttctgcaggttcatgagatgcagattggggggctgggccttggggggctggttctcgctcttggggaagtactggagggtgctgcttggtttctcagaggggatgatcctggataagtcgaactcaggaatgccggtaggggtgggccggatcacctcactcagctctgggtcattcagtaccgatgccaccccagggagcaccccgggtgggtatgcgtcgcccatgcggccagtcatgcctttgcccattaggtgctgctgggggggtatgggacccggtggctgggtgggcaggtcctcggggggcagggccatgcctgaagggtagtgctgctgcaggcctgggcccccggccccggtgggggccatggcaccgtgaggttgctgcagccgaggagggaaggacatcatctgggaggagctgggcacagggccacaaggggcatttagggagtctgggcctcctggggccatcatcattgagttttgagaagagcccccagtcccctgtgcattgggatgcagtggaatgttggaccccagaggggtgggggagggcaacatagtagggggaggctcatgggacaggggctgctggcctggcaagttcatgcccatggggctctgggcagcagcagggttcatgtgcatctggttgggctggttattgctgatacctgtgggaggaaggacgaacgggacattagaggccatgcccacccagtttggggaggggtctcccagtccttcccagcccactaaagagctctgggctaggtttcatgaagcgatggtagtcattcaaacggggcctcagagctcacaccacccccatgagcagagactatagaagcatgcagaagccagcatgtccacgggggcaattcctaagcaaacccactgttgccactcccagagagagctctgcctcctcgcacctggcccagagccctgcggtggtgggggtgggggtagcaggggccggtcaggcagcagctcgtcatctgaggtggcgatggtcttgatggcgttgtggtatagcggggtcgagctgggcatggcgtacttggacatctgagacatcatcagtgacagagggttctgggaaggggtggggtctggggaggatgtgaacggtaggctggggttcatgaggccactggaagggttggcgggaggagcggaggagctgttccggggtgcgctaggtggaagagcacctacagaagcggagagacagaaagagagcgggagggggggtgtcactagcgaggttaacgtcccccaaatctccacctcacgtcagacacacccatatcccactgaccacaggttccctgtggtccctacggcccatgcttctccaagcagtttccccagtggggaaagtcctagctccaagtggcacccttcaagatgtttaagaggctccggcagagcatgcccctgcaggaacctacccgccaccaaggctcccacccaagcccacctagatcactcaccctgttccacgttgcccagggtggaggaagagtttatgctgagaggtggctgcttgttctgggagaccccaggactaggcatggctgtcttgggagaggcgacccagcctggagaaggcaccgccatggagggagacttgagcctgctgggtgagccagtgggtgaacgcacaccgagggaagagctgaggacctggggtgacttgagaggtcccggtgggttggcagaaggcaagggtaccatctgggagggagtctggggtgacttgaggttggcagagggtgaggtgaccaggggggagtgcacctggctaagggtgggtgacttcagatgtcccatgcccggtgagcccatctgattaatactgatggtgagatctgaaggccgcctgcctagccccctgttggaggccaagtgcacagacccaggaggattggaggcagggggcagaggcatatggctgagccgggcagtgcccacagtgcccatgggcactgaactctgatcagggctgaacatgtctggagtgttgcccatgtcctggggcatggcttggtaaggtccctggcccccagagaatccctgctggccctggttgggaaactgtgaaggcatgagcatcttctgcggaccccccatcatgccactactgttctgggcccgaacccgagccatctcttcgggactgaggccctgaggacccatcatgtctccagggccccgcatcttctgtgacatcagcatctgctgctggggcgtcatctgcacattcaggttcatgttcatgttcatgttcacattcatgttcatgttgaggttgcctggccccataggcgggtctacctcccgcagcccagactgtcccattggagggctcaggaggccccgacctccaccaaactctatgcccatgggtgtgccggcgagaccatctcctccagtcatctgtcccgggaacatggcagggtccatctgtcgatgagcctgtatcatccgttccatttccatgctctgtcccatgccgctacctgccatgcccaggggacgctgcatgcccatggaccgcttctccagcaactggtgcctcagcagctcctcccggacacgaggggtcatgaatcgctctgcctccccctgcccacctgggtagggcacggcattctgggcaaagttgctgggtcccccaatagggggcaagtcttcattccaggccatgcctggccttacaggtctctgcatggcattcatgggtacttccatgggcatactctgcatacctccaaatccgggcaccctttgcatctggttgcctgggaaacgggggccagggaagggaggtccaggtcggagctgcatgggatcttggacatccataggccctcggagttgtgcacccattccaggtggccactgatccnnnnnnnnnnnnnnnnnnnntcctgcagagggcggcctccgtgcaatccaatctgctcctctttccgccgcttctcctcgtagtactcttcctgcagtttgcgccaggccacctgctcgggcgtcagactgtcctggcccagcctctgcatcatcatgttcatttgctgtcccatgtctccaccctgagggtgccccggcacttcatgctccagagggggacctcctaggctctgtgtctgtgagatcattgactgcagaggctcctcatacttcttcagccccccaggaggggcggagggaggcggttgagcagcagagggcgcttgtgccggtgggcctccctcaccagctcctcccgggggccccttgaggaagggctcagtctccccactgcggagcagcagcctctcgatgtcccgcagtgtctggagggagcgctcccggtgctccagctgctctttggacaggccctcagagcccaccaggttcctctgcccatttccggtgggcgtggcctcccccaatagggcggagccaggggcactgccagggtctcctccaggaggcagagggttgttagcggtggcagccgttggggtgttagggtgggtacccccagtcccaccacctgtactggcagctcccactgagttgggggccaggtcctgactggtgtcttcaggaggcccctccgggggcagagcaggaggggcactgccaggggctgggggtggcggtggcaaaggaggtggctgggactgtggtgtacctgctgatggcgtattcaggggtagtggttctggggtgggtggcactttaggggcctgcaggaggacaaaggtaaagaataagacagatgaggggacatcccaaagaatattagagcctggcaggctaccacacttacctgatccagcttggcccgaggcacattctgctggtggtaggcaaggatggactctgcccggccctgcagcactgcctctgccgctctgcatagggaagcagccacaggcagctcagagatgggcaaaagcaagctggccctcacccaccaaccttgcaccgcacccccaccccccctttgctcaggctggtcagacagacaaaaccctctcacccctcatctctcccaaagacttacgtgttggccagatgggtggtgaagacatagacgaactgtgacggaggctttcctgggacgcccccacccccacccccaggaacgtctggccgaaggcctggctgggggccatgttgggggcctggtgcactgctctcactgaggggcagttgggcagtttggccaggacccaactgtggggtcaccatggctgggtctgctacattacaatctgtaagaggaggaagaaaggagagcgggtgagcggcccagacgtgggaagaaggccaatcagccggtgttcctgccctcagatgctcgctcactgcctcaagcccatgcccagagggtcatctgtccctacagtctccgtttaccagcctggctttccagttcacttaacctatactaacctttgctcaagatggccaggatgcagaaagatgaccatggagagaggtgagaaaaagtgacagaaaccccaaagctctgctctaaagctcccacactcaagcacttgagatcagtcagtttctctgcctctctctctctctctctctgtgtgtgtgtgtgtgtgtgtgtgtgtgtgtgtgtgtgtatgtgtgtgaatttactgtctaaatgacccagccaaggggaaggtagggaggacatagtagtaactgatgattcaaaccacagacagattttcatcttaccccacgattcactaactgtggttttacaaaacagcatttgtttaagcctcagtttcttcatctacaaaatgcaaacactactcatctcccacgtgccctgcccaaggacaagtccttttaaaaacatgggtactacgccacaaagcaaaacatcagtttcaacaagagtcagaaaggctttcacaaatgatcaacgcaagacttcggtcacctctgatgaccaagaatctcacggaggtgttcccatcaacaacatgcatacacacggatggatgcaggtgagatgaacacagtttgcaaggcacgtgagaaagggcatttgcttctgcaccctctctgaacacgagacagtccttttggattttgcaggggaagggcatacatattgcacacattcagtttaagggcacagggcacatatggagctcaacagagaacactaagtgttggctctcagactttatcatgcacaccacgttagctggacaatgacaatgagcttccagagaacctggctgctctgctttgaaagtcccatcactgggctgattataggcaggtaccactgtacctggcttcctgtgtgggttctgggaatccgaaaccttgcaaggcaagtttctcccaactgagccacctacccagccctcttttttggatttttacagattaatcattagtcacatttaattaaaccattagcttcaggtgatcaatttgactttcagccccactcctttgacgaggatggaatgtagggctgaaagccccaaacctctatcctgctttgattttcccagtcaccaggttccatctagaagctacctcaggactgccagacacaccagtcgatacagcattaaacaaaacagaacaacaaaaaaccacttatccctctggagcttcccaggaaacaagagaagaccaaatatatgtttcacaatatcacagactcacatactcggaacagccgaatattcctcaggagcaagacaaatttcgctcctcggtcacaagcctggcattccgttctcacatagataagacccacgactggtcttcagtggttttaggtgaggcagagatccatggtcataccaagaaaaaacaagttaaagcctccggactacaaacagcaagtgccagcacttcccaaaatcacaagaacttgaccaaggtggcagacaccagaggcctagagtataaatcagagcacacaacaggctcctacaggctacggagagggaagcagagtttatcacaagaaggaattttctagtaccctaacagcaatacaagctagcactgttcaaagtatgtcacatgcctggactcaactttctccttgtgccaaatctatatgacaaagatcacttctatagatgagcaatcagaactcctttctcaagtttacagtccctgggatgtaagtaaaggcgcctgggctctgagcctgtctcattgacagctacctcagtctgccttgctgtgtgaagaattcagttgcatggttgaatgctgctgaatgacacagtgacacaagactataatcccagcacttgggagctataggcaagagggttagaaggtcaaggccagcctcatctatacagtaagcctgaggctaatctgtactacatgaaacctggtcttcactgaattgcattccatctaaaagaggctggtcaagggatcttagctatttcttatcgctctgtatctttcaaagtttctccaatgacacgggataatgttacagacacaaattcggggagacaggagggttctggtcccaggaagcagtgacagattctaccactcaagcatccatactgagactgaacatagctcatacagcactagttagtcacatggggccttggcagtcccagccagttgtagagacttcttacaggacactggtcagtagggtctcctcattccctcttgctgactgtttcctccactgtgacagtcatcattacactttcttcatgggcagctgtgaggactaaactcagtagcaaatgtatctttcttctcctttccttaactcctgcctgtaagcagcacacaatttaagctctggctagcttctcacatgcttagttaggttggaagcaccaaggatgtctcgggcctcaggcacagaaggatggattggaatgagagaaatggctatgaatcctagaaatgcatcatgagcattttctgagtgtcatttagagactggagaaaggaaccagggacacaattaagggtcagttcacacctaggcttagcaaggctttgcaaagccaagctaacagattcccatcttcctgcccatcctccactgaccggtaggtggcagcataggccatgaaatctgttagatgtgtaggtgagttgtccggaaaagggattacctgagagaccttcgacagagggagggagaggggaagggaaagagagagggagggtggcgagggtgtgagcagcactcacactatagataaggaaaaagtccaaagtagggctgaagaagagcctgggctcctagtccttgccatttcttgaacaatcccctaaagcccaaggtaagctccctcaggacggacacacacacacacacacacacataccaggggaagggcaccatgaggcacagcatcaatgggcactcactgtgggcggccgcaatgggcttgtcgtcctcctcgctgtctggcccagagcaccattcgtccccactgtacggctgcttccgctccagcacacacctccgtttactccggggtgccacctc

SEQ ID NO: 158 - DNA, 2517 bp, Mus musculus
atgaactacccactaaccctggacatgggctccatcacatacaatatggatgacctgtacaaggaactggccttctacagtaacagcacggagattcccctacaggacagtaacttctgctctacagtcgagggacccttactgacgtcctttaaggcggtattcatgcctgtggcctacagcctcatcttcctcctgggtatgatgggaaacatcctggtgctggtaatcctggagaggcaccggcacactcggagctcaaccgagaccttcctgttccacctcgcagtagccgaccttctcttagtcttcatcctgccttttgcagtggctgagggctctgtgggttgggtcctagggaccttcctctgcaaaactgtgatcgctctgcacaagatcaatttctactgcagcagcctgctcgtggcctgtatagctgtagaccggtacctagccatcgtccatgctgttcacgcctaccgccgccgtcgactcctctccatccacatcacctgcacggccatttggctggccggcttcctgttcgccttaccggaactcctctttgccaaggttggccaacctcataacaacgactccttaccacagtgcaccttctcccaggaaaacgaagcggaaactagagcctggttcacctcccgtttcctctaccacatcgggggcttcctactaccgatgcttgtgatgggatggtgttacgtgggcgtggtccacaggctactgcaggcccagcggcgccctcagcggcagaaggcggtcagggtggccattttagtgacaagcattttcttcctctgctggtcgccctaccacattgtcatcttcctagatacactggagaggctgaaggctgtgaatagcagctgcgagctgagtggctatctctctgtggccatcaccttgtgtgaattcctgggcctggcacactgctgtctcaatcccatgctttacaccttcgctggcgtaaagttccgcagtgacctctctcggcttctgaccaagctgggctgtgctggcccggcctccctttgccaacttttccccaactggcgcaagagtagtctctctgagtcagagaatgctacttccctcaccaccttctagatcccggaagtctcggggcccctgtctgtttctgttttccttgggaggataaagtggtggcggaacccatccaactcgagcttgggccagtgtccccagatgggaaagctagataaactctctcaaactttcccaaaggggaaagcagcccaaaggcaaagcaagctatatccaggccacctgtatcaccttagatgaagagaactccatacacctcccatcctaaccagctaaagctaagctcagctttatttcttcctggccatagggacaaccacctctgctgtggcccacagtctcatcttcctcctgattatgagcccagactctcctcccagaatgtattccatcatcttaaagactactggctgccacagctacccaccactcctataccacagaggaatagccaggctgggcggcggcagactatggccttaatgtgcctgtctcataaatacagacttcatgccagaccttcaaccgtgcctttctcttaaccaagcagaaagctgaaaccgatctactttaggtagctgtctggttccaacctaaccagcattgggtcagccccatgttactggatcttggattacagactgagggcaagttccagaaggttctggaagctagccagtatcctaagaagagtaaagggcaagccagcaggaaagaggcccagtggaaaagtggaaagacaccttttccaggctctaaggaagaacaagtaaaaatcaaacccagctgtcttctccacccaatgtaccaaagcttacagactggtggggaaatgagatccagggccctcgtggattctacgcaccaatggggaaggaagccaacttgcctggggaaagcaagatagcaaagtggtcctagcctcgagagagggacacctagctaagagaatgacgacagaggttcctgtcttcattaggcagaggcaatataagaagccaacctgggcaggcaagtcctcaaaccccaggaagcagtaccctgcccctgggagggtaccactcacatggaaccagaggaagctgctccatgcatacataggggaagttagcaggcaattctgagctcggcttcctcccagccaccgatctgggggcgtgggggtaggaagcagagttgcctagtacactcaagccaaccgtacaagctccctgggggatcccactggggaaaccaatgctatagcttcagagactgtatcctcattgcagaaccgtgaagacacctggggacccccttttctgctcccagcatccaacaaccagctgggaagaggcaaaccgggcacagaaataaaaatgcaagagatggcatttttgaattttctctttttaataaaaaggcacctataaaacaggtcaatacaggcagaga

SEQ ID NO: 159 - DNA, 1125 bp, Mus musculus
atgaactacccactaaccctggacatgggctccatcacatacaatatggatgacctgtacaaggaactggccttctacagtaacagcacggagattcccctacaggacagtaacttctgctctacagtcgagggacccttactgacgtcctttaaggcggtattcatgcctgtggcctacagcctcatcttcctcctgggtatgatgggaaacatcctggtgctggtaatcctggagaggcaccggcacactcggagctcaaccgagaccttcctgttccacctcgcagtagccgaccttctcttagtcttcatcctgccttttgcagtggctgagggctctgtgggttgggtcctagggaccttcctctgcaaaactgtgatcgctctgcacaagatcaatttctactgcagcagcctgctcgtggcctgtatagctgtagaccggtacctagccatcgtccatgctgttcacgcctaccgccgccgtcgactcctctccatccacatcacctgcacggccatttggctggccggcttcctgttcgccttaccggaactcctctttgccaaggttggccaacctcataacaacgactccttaccacagtgcaccttctcccaggaaaacgaagcggaaactagagcctggttcacctcccgtttcctctaccacatcgggggcttcctactaccgatgcttgtgatgggatggtgttacgtgggcgtggtccacaggctactgcaggcccagcggcgccctcagcggcagaaggcggtcagggtggccattttagtgacaagcattttcttcctctgctggtcgccctaccacattgtcatcttcctagatacactggagaggctgaaggctgtgaatagcagctgcgagctgagtggctatctctctgtggccatcaccttgtgtgaattcctgggcctggcacactgctgtctcaatcccatgctttacaccttcgctggcgtaaagttccgcagtgacctctctcggcttctgaccaagctgggctgtgctggcccggcctccctttgccaacttttccccaactggcgcaagagtagtctctctgagtcagagaatgctacttccctcaccaccttctag

SEQ ID NO: 160 - DNA, 32404 bp, Homo sapiens
  misc_feature (384)..(403): "n" at positions 384 through 403 can be any base.
tttaaaaagcatgagtgggcctgacgcagaggtgcatgcctgacatccccgtgctttaggaggctgaggaaggaagtttaaggccaggagttcgagaccagcctgggcaacatagcaagaccttatctctacaaaaaaaaattaaaaattagcctggcatggtacacacttatagtcccagctgctcaggaggctgaggtggaaggatcgcttgagttcaggagtttgagactacagtgagcgataattatgccactgcactccagcctgtgtgacagagcaagaccttgtctctaaaaaaaaaaaaaaaagcatgattgtgtgtgtgtgtgtgtgtgtgtgtgtgtgtgtgtgtgagtgagtgtgtgagagagagagagaaannnnnnnnnnnnnnnnnnnntacaggcacatgccaccaggccccactaatttttctatttttagtagatacggggtttcaccatgttggccaggttggtctcgatcccctgacgttgtgatccgcctgcctcagcctcccaaagtgctgggattacaggcactagccaactgatattttgttgactgaagatttcaaacacatacaaagtcggtctaatgaaccctacatatctgtcatccagcttcatctccccacaggcaatgttattaacacattcattcccctttcctggattattgtgtgtgtgtgtgtgtgtgtgtgtgtgtgtgtgtgtgtgtgtgtgtgtgtgtgtgagagagagagatagcactttggacctatggaggatttctatttggaaagaaaaaggcttttacatacaagatattatttaatagcaaaattggccatgcaggtattttacaattgtacatattaggaaactaatgctcagagaagttatatttgtaattttcaaactggggattgtgacttatgtgtggacccatgaaagcagtgtgattcattgaccgctattaaaaatagaaagagggtcgggcatggtggctcacgtctataatctcaacactttgtgaggccaaggtgggaggatggcttaagcccaggagttccagaccagcctaagcaacataacaagaccccatctctacagtaaatttaaaagttagtttggtgtggtgatgcacacctgtagtcccagctactcaggaggctaaggtgggaggatcacttaagcctgggaggtggaggctgcagtgagccatgattgtgccactgcactgcagcctggctgacatagagagaccccatctctacaaaaaagggaagaaagaaagagtgagagaaagaaagagggaacgaaaggaaggaggaaaggagggaaggaggaagagtagaaaatatgagtatgctacccatactaagcagtgtttacaaaacttactgtgtatttgtgtgtatatgttcatcacacatgtccaactagcttgtgatataaaatatatttcttcctatgggtcatgatcaaagtgacaggattacatgacatgctgaaagctaactagtagagctcatgcattacttattagagtagagctgagaccgaccagagagatagaggtgcaacctgtcagagcccgggaggcaccacagaaatctcaacggtgccagggtggggcccagggaggccggtgttctgggaaaaccaactgttgtgtgctggttgtatgaagtgctgtgttgttgtgggttgtgtgctggttgtatgaggtgctgtgttcttcctgttgtgtgttgtgtgctggttgtatgaggtgctgtgttgttgttgtaggttgtgtgccggttgtatgaggtgctgtgttgttgctgtgggttgtgtgctggttgtatgaggtgctgtgttcttcctgttgtgggttgtgtgctggttgtatgaggtgctgtgtcgttgttttgggttgtgtgctggttgtatgaagtgctgtgttgttgtgggttgtgtgctggttgtatgaggtgctgtgttcttcctgttgtgtgttgtgtgctggttgtatgaggtgctgtgttgttgttgtaggttgtgtgccggttgtatgaggtgctgtgtcgttgctgtgggttgtgtgctggttgtatgaggtgctgtgttgttgctgtgggttgtgtgctggttgtatgaggtgctgtgtcattgttgttgattgtgtgttggttgtatgaggtgctgtgttgctctggagagacgtcaactatggcaccctttgtgtggagggactgaaggccctgctgggtggttgggagctccaggttggaaaacaagctgtgtggggacgagtttaccaattggtatatggctgtgtaccagtcctacgtggcctagagcggtggttctaggagtgtagttctcaggccagcagcatagcgtcacctggacactcttagaaatgcacattatcaggtcccaccccagacctcccgaatcagacactctcgtggtggggcctggcaacctggaggtaacaagccctcctggtgactctgaggcataaagtgtgaggagcactcccctggggatgcctgtttggcattctgtgtttggcgtgtctttgcgcaagcaggcagggtctggtctcagagcggccttgctgggaagcagacatgctgggcctccagtgcagcgtttcttctgtcacccactcagccttacagcctacccagcgcatgcgcccacagcacttaggtgcgaaggaatgctgcacgtttcccccattccctgtgccttccacactgctgactccacccacactaccttagcaacacggtagagttttgcatattctttgaaaatgtgcccagttgcatgtgaatatgagcatgccaacttgcatgatgtgtctgttttgccttctctgttagacaaggtgctcctccatcagaatctcgcctctggctgccgcagtactcagtatacaaacacctgatccaagcaccagactcactctaaccctggccacacaacctgccccaggccgacgttcccaagctcatttgtggcccccatgaccttgtggtaaccttgatgtgcctacccagcacctgcagcccatttcctccctgcaggactctacctgtttcctaacgagaggggagctgtgcgtgggtgcaggctgccggcaatgacagcctttaccaccccacttcctgtgttgacttgtaatggggtgttgggtccctgctgtctgagtgagctgtgaacattcatgctacttcccattactgtctgaagcttggtttccacatctgcagtgtggtaataaaaatacccaacactttgccggacgcggtggctcatgcctgtgatcccagcactttgggagaccaaggcaggtggatcacctgaggtcaggagatcgagaccatcctggccaacatggtgaaaccccgtctctactaaaaatacaaaaaattagctgggcgtggcggcacgtgcctataatcccagctactcgggaggctgaggcaggagaattgcttgaaccagggagtcggaggttgcagtgagccgagatggtgccaccacattccagcctggcgacagagcgagactccgtctcaaaaacaaaacaaaacaaaaaacccaacactcaaagactgttcagggaatgaaaagaaatgatgtgtgaaaaacctatcatagttcatggcacatagaaagtacctgatgaggagcctgtgcaggatttagccatagttttccccttagccagccaggtaagtgcctgtcctttgcaaaatggcgcctctgagagacgggccgtgtggtcttgtggagggagccctggatttggtgcctacagggctgacttcaggctctgactctgcaacgaaccctccctgcaatcacgagcaagaaaatgagactctgtttccttgtcctcacaaaatacggccaggagtgatgccaatccctccggcacaagccgcttcaaggactacatataattaaatgtgaagattaagtgaaatataaagattaagtaacattaaatttaaactttcatgggactgtgtagaccggtgactgctatgcaagtctatggcgagtttccttcagtgctgagaggtataccctactcttcctgaggctgatgaggtagggacctgggagctctgttctcagctgttgggaaagacccagagaaagaagagaacaaagtctctggccatgtcagagagggagagagtcctaggttaatagaaggggaaaccccagcccgttccctgtagcagcaccccaaaactgtgtggaacagcttactttttctgtggaatatagaaaatgaactccaagacaagtgattgtatctaatctctggaacaaatagaaatttaatgtaatccatggactgtaaagtataattactgagaaaaatacacctgagctgatgtaagcggccacccttgcctaaaccagacacaaacccagtcttggcggaagtatcagtagtctttctgtctttttttttttttttttttttctgagataggatcttgctttgtcatccagcctggagtgcagtggtgcaatctcagctcactacaacctcgacctcctgggcccaagcaatcctctcacctcaacctcctgagtagctggaagcactagtgtgcaccaccagctaatatttttattttttgtagagatggggtatcctatgttgcccaggctggtctcgaactcctgggctcaagtgatcctccccccttgacctcccaaaatgctgggattacagaggcgagctaccatgttcagcctccagtggtcattttgacgagaaggctagaaaacaatttagcctcaattagactgcctatggggtggggattgggatcctgcataggtgaaatataaacaagttgcacactgaaataaaacctgagctgcctgacctggaagggtcctctgccatccgattgtcacacacagatggaacctctgacatctcctcttcaaaggcaaaggatcgcagcttaagcgttgccctctctatcctagggagctagtctgactttatgtgtgtgaagattgtaagatcatggtttctagtagaggcagtaactctctgagccttctcaaaacaatattagaactcacggttgctgggcatggtggctcatgcctgtaatcccagcactttgggagtctgaggcaggcggatcggttgagcctaggagttcaaggccagcctgggcaacatggtgaaactctgtcttgacaaaaaacataaaattagccaggtgaggtggcatgtgcctgtagtcccagcaactcgggaggctgaggcaggaagatggcttgagctcaggaggtcaaggctgcagtgagccatgatcgtaccactgccctccagcctgggtgatgaaatgagatcctgtctcaaaaaaaaaaaaaaagaaaaagaaaaagcctcaaggtcagaaggtatttaccactgggggcaaactgagttgactatcaaaggtcagaggctaacacaagtagaccctgggaagctgtagtgtgttcaccatctggagagaagaatgggatctctgaataggcccaaaaagtcaaagacttcaggtgacagtcacagatgtgtctaatgtgtgacgcctgagtcagccatagagaagctggtaggctacctctctgctgcccaaaccatcatagctgaaactactggccagagcctgctgctatagcacctgggaagcagtcttaagcctcccccaaaactctttttctaggcctacagcacatgtggaaaatatagagaactgtggaaagagtaggagaggagaaggccataagagcagctcctaccttgtccagtacatgctccaaccacttccttgctcctccccctgccctatctcatcatcattattgccatagccacaccaccatacacagaaggcccatgatgtgccaggcacaaggtaattctttttttttttttttttttgagacggagtcttactctgtcaccaggctggagtgcagtggtgccatctcggctcactacaacctccgcctcccaggttcaagtgattcttctgcctcagcctcctgagtagctgggactacaggtgcccaccaccacacccagctaatttttgtatttttagtagagacggcgtttcaccatgttggccaggatggtctcaatcccttgacctcgtgatctgcccacctcagcctcccaaagtgccgggattacaggtgtgagccactgcacccggccatgcccgggtagttctgtcgcccgcactggagtgtggtggcgcaatctctgctcactgcaagctccgcctcccgggttcacgccattctcctgcctcaacctcccaagtagctgggactacaggcacccaccaccacgcctggctaattttttgtatatttagtagagacggggtttcaccatgttagccaggatggtcttgaactcctgacctcgtgatccacccacctcagcctcccaaagtgctgggattacaggcgtgagccactgcgcccggccagataattctttctacacattttttccaagcagttctcatcatgtcccacactgtccaccctgtccccctctccaggcacaccaagccttcactctctccaagcctccagtggccaagacttccatgaagtctttcctgacctttgggtatagtaagtctctaatggcatgaagcagggttctggttttggcttcatcctgtcaatatttgccatcaggacttggatagacccaaggatgacttatctatgttgttatcacatcaccagatgacagaattgggatcagaaaaatttccctttataggttgcaacaatggcccagaaccttcaaaatgaaatcctttaggcatgttattaagaggagtaggaccctgcaggaaagtccaattgtattgtagttacatagttatagaagtatggaatcttttttttttttttttttgagtgtcaccaaggctagagggcagtggtgtgatcatggctcattgcagcctcaacctcctgggctcaagcgatccgcctatctcagcctcctgagtagctgggactacaggtgtgtgccaccatgcccagctaatttttgaattttttgtagagacgaggtttcaccatgttgcccaggctagtctcaaattcctgggctcaaaggattctcccatcttgacctcccaaagtgctgggattacaggcatgagcaaccacgccctgccaagtatagagtcttgaacaaggaaatgcatatcgtcctatattttttcctagtcagataatatctagaccattaaccagaaatcacccagaggtcaaaaaacagggcgtcaaaggacccagaaaccaagtctgcaaataacgactgaagacactgtggaagtgtgtttgggagacaacaagactctcaggatgtgctggctgtcttcagaggatgcttattggaagaggagtcagacagtccagacagaaggcacagccaggacctctggagaggagttacaggaagacatattttgactcatcataaggaataagtttctaatcatgaaaccatcctccactgaaacatgatctattgaaaggagcaaatgtctcaccttcattgatgttcgtattcattgattctgggtgatcatctgataaggatgcagtgacgagaatcttgcatttgctgggggtgggggtgtggttgaggatagtctggtttatattccaaagttcctttcaattcctctatgattctatacgctgtactccttcctgatcaatgtccctagccagggtggccaaggctaagtcaagtatgctaagggattggaggggcagggatattgagaatagggtgaatggaaggatgaggagttcccagcaagcttgggacacaggaaaccttggggcagcttcctcctggaggtttcaggactgtacgtgctggagaagaagtgtgatgccttgtcctgaaagccgtcttctttgaaagcagcttctaaaggcagtgaatggagaagagcgaggaaacgaccccaataccaccaacagaggctggaaactcctcaggctgtttaatcctaagaatgatgcatctgttggccgggcacggtggttcacatctgtaatcctagcactttgggaggctgaggcaggcggatcaccttaggtcaggaattcaagaccagactgaccaacatggagaaaccccatttctactaaaaatacaaaattagccgggcgtggtagcgcatgcctgtaatcccagctactcgggaggctgaagcaggagaattgcttgaatccgggaggtggagtttgtggtgagctgagatctcgccattgcactccagcctgggcaacgagagcaaaattctgtctcaaaataaataaataaaaatacaaaattagccgggcgtggtggtgcatgcctgtaatcccagatgctcgggaggctgaggcaggagaatcgcttgaacctgggaggtggaggttgtggtgagccaagatcatgccattgcactccagcctgggcaagaagtgcaaaactctgtctccaaaaaaaaaaaaaaaaaaaaaaaaaagaatgatgcatctgttggggatgcagtggggtaagcatcttcagtaagcaaggtgtgaagaggggaaagagggaaggtgaatatggaggagagggtgaaggagggcactggaaagggtagtaggatcccagcaaagggcgatttggctgaaagggagcgtgataacaagggtgggggtggggccaagaagcagccaccatgtgtgggtgcctctgtgcgtgcagtcatctttctcacatcattgtggatcaagagaggaaatgcccacttctggaagaaaaagccacaaaatgagacttggaagggaaattgatcaacatctacaaaacggcttcttaaaggaagcggccctcagacaggacagagttgagggaaaggacagaggttatgagtgcctgcaagagtggcagcctggagtagagaaaacactaaaggtggagtcaaaagacctgagttcaagtcccagctctgccactggttagctgtgggatctcgggtaagttgctctccctctcggcctcacggacctcctgaataaaaattgagggttagactggatgatctctgaagccatctctagcttggtagtttatgaggttaataatttatgagcaaacaaagttaatttatagatagaacatcattatttttgagtcagaaaatgactctgtaactatgtgcttttcttggtgatttcactttttttttttcttttagagacatggtcttgctatgttgcccaggctggtatccaactcctggcctcaagccatcctcctgcctcggccttccaaagttgatttcatttttgtcttccagtattgttttactgttgttccctttgaaaaattctaacctatcttttctgaacttgagctgagaagggaaggggttttgcctctgttgggcaaaaggatggtggcaagtagtgtgaccaagtgccctaacttgccaggacttaggggtttcccaagtcaagggacttttcagtccttggcagactggaatggttgatcaccctagtggtgaggaaaatgaaggtttggaggtggcttggaggagaggttgctgggagagctcttctcctgttctctgttgatcaggagtttccctcatcaacctgctgactttgcgtggtggtttcattacaagttgtgagccccttattgggggtatagggaggagaagtgagggcagcctttaaactagtcataggccccagttgagacaattattgccgggaaagaagctgaaatgcttgactagcactgatgctgtgggggattttccctctttcttcaaaaaaacagaaaagacccagtggaaaaaaaaaaaaaagtgatgagttgtgaggcaggtcgcggccctactgcctcaggagacgatgcgcagctcatttgcttaaatttgcagctgacggctgccacctctctagaggcacctggcggggagcctctcaacataagacagtgaccagtctggtgactcacagccggcacagccatgaactacccgctaacgctggaaatggacctcgagaacctggaggacctggtgagtagacacgggtagcttcctgtcgccgaggccctgtctggaattctaacatcctttgccagagtccgagggagaggggacagtgtgggaatcctctcccactgtggatctgtaaaatctagacaggtcagtcagctcccgccctttaagagtttattttccattctgtggaagaagcagataaggagagctgctgtccttaggagacatcctttagaggaagctggaagacacgggttcaggccctgcatcctcctctgagttgctatgtgactgggaacaggatacttcacctctccattctttctctccttttctcttagggtcggaatatggaactagacaggaaagtactttggaggttttcttaccgtaaggaggctggcattgctaatcagtcaatgaatgcatagctgttcgtctctggccatatgattatgtcatcagggcactacattctgtgttgggtggagaagttgaggacctggtctttgccctcaaatagcttctgctctggccagagaaaaaaatcactcactggaagctattaggcaacaattatgtgctaaactgagggaatgtgagaccagatggtagcaaggaagaggatcccagcaggctggagtcagggagcagggtgagaaaactgttaatctgacaaatgtcttggaacctgttgtagaatctctagagataaggtattcttggaaaggtttcttgggtgggctaagaaaatggtctccagcactacgctgccaccactcaagtctctccagtgaagcgtagtggtgcagttgacttggttgtcactgggctcccagaagatgtgtgtgtgtgtggagcagctcaaccagagaaacacagggttccttgtgagccgacggcagaggctggttgtaagggtttcttggaaacttcttcactgtcttttctccccctggagagaggacttgtttcggggctgcactctgggttagatcatgaaggagccaaaccctggctcctaccaactctcctgtcccaaacttaccctaagatattgtctgactccctcctgctcccccggctggagtggactttgtggagtggactttgtagttccaccaaccatgttcccagacttgctcagagaagcccgcctctcgcttgcccagatcccaaggctgggaagtgtaagtaggacacggggagaaagtgggcagaagggctgactacccaaagcctggcccctcggatccaaaccgtaggtggaatcagagccggaccattcatctaaccaggacctgctacataatttgtgggacccaatgcaaaatgaaaacatggggccccttgttgaaaaattattataaataagaaggcaacagcagagcactaaacctcgtggggggtcctgctgggtgcaggcccccgtgtgactgccccagttgcaagcccatgaagctgccctgagtctaatcacagagtctgggcaataccccaaatcagactaaaaacccgcggccccaaaggggcaatgtgctcccaccctggcccccggtcacagccgctggcctcgcctgattaggttactgggcgtcttcctctgcctgcagcttcaaactgaccacgagccctgacccagttggacatcttagtaaccaactggagacccggcgggtcccagcttctgagaaaccttaagagtttcccctaactgcacgcctcacctcactgagtgacctactagggacaggtgggggcagggggcaggggcagcagggcatgtcccaagaaaacctacatctgggggaaagggacccagtgactttcttcatgtcacacctcaaatgagtgatcctcagccaggcattccaatatctggatccctcactcagggtctagccaggagcccaggagtcctaggaccatctgggctctggagctcttcagccagccaccagtgcctcgttcccccttcacgaatctcctacacaccctgtctccagggccaatgtcccctcagaacacagaccctctcctccgcccccacccactcactgaagggccgtgagcagcttggcagactgtccctcagtgtcacagtacaaaaacctcgggcgtagtggtacaggcaggagaatcttgcatgtagcagcttctcaataagtatttattgatttgtgatgcagtaaaggtcttagctcaccattttcctctggagttagtctgggtccttctattccttctgcttcctattctcctccttgtccttgcccataccaggtattggttcacattccttgaacgctgggttttacactctcatgttgagctaagaactggggccttttggttacacaaacttgccagaaaaaaaaaaaaaaaggaactgggggctcctggccataagccaggttcgtcattctgtattccatttgtcctcttgaactcgaagaccaactcgagccgcttaaaatgtccacttctttaaggcaggggctggagggtggggaggggctgctaattctcatgaatgaaaggtccaaatagaacaaaaattagatggctaagaaccaggaacaagaagattccaggtcctggggtgggtatgccagggacccatcctgctggaaaggccgatcctggcagacctagagcagaccctgtctatgcgaccctcgatctgagagcctccttccaacagaaccagggcctgggctggggcatccacagaggctggtcataaactatacctccagccccaccctgcacaccagccgggaggggaagctgctatagcgcacggtgaagctggtccaagccccagagcctggctttctatgacccctctccatagacaattaccacacatcatgacttcagtgtgaccagagcatcacaggcgacacagcccgtccacgtggaccatctcatttcatcatgtaggtgtgaagaagaggaaccaaaaccagctcaggctgtttctgggcttcatctaggggaaagggaggttctccacccgccccccgcaaccaggtcaaaagtcccagaggaaccccagcagaggaggcccaactggggtgtagttggaagggtcagagatgagggagagccccaaggccaagctgaggatgggtcagggtcaaagtgaatatgggttcgggcatacaaactgcagagtctccgtcaggaactcttgctttccccagggacgcaggctgcagctgatcccactcctctagcagaacggcagaaacagtggccgcatatgtggacctaagaatcaggacacaagaatgagcattctttcaagagtggtggggaaaaatatttccaacccaggagatggtttcaagaggctgccacacacacctgggaggcctgtctgcctgcatcttggactgtgtgactctgtatccaaagggcaaagagacgctggggtgccaggtggggctcccttaagcctaaagacttgctgcagaggcttggagtagcttaaactctccccctaacaccacatccagcacagtacctgcttctgatggccaaaacccgtgggtagagatgaaagaggagtctcacagacttgtccctgaaggctgtgggtgcggcaagggagatgtgacaaatggcaagccagagtctcagatggtctttaggggctgtgggcctcctgaagaaagacggggtaaggggtacagacctaca[450 bp omitted]ttgaaggcagagtccagcctccttcttcccagggcaggaatctcttcccacacacttgggctcaaacgttcctctccttcctaaaggtaccatctcattgctggacagttctgtctgttagaaagttctccctcctttgactgaaacgctaccccctcagcttctgcccagtccttctagactgccccctggaagctcatagcaagagtccattgctgccctcttgcccatggagcttctttccaagccttgacatcagccctcagggactcaagtcttctctgtcccagacactacacccctagtacctgaaaatttcctctatgggcagggttttccaagcccctcaacaaagtggtcatccttgtccagaccaaccaaactgggctggtgtcagctgcccacttacaagcctctgttcacctagatgaaggtaacagtggcccttcggctggccacgtcactcccgtgactcatcttaagcttgtaggtgacaaactcccaagtctttctgacgaactgttgttacctggtcctccctaacttatccctggacgggtaatgttttaaacctgagtcctggcttgtatatttttccccatgcaatttcatctggttaggttggacccatggttccagcttgtaaagaactctgtgttgcctgagagtgcccccaaagctgggctgagagtgctgaagaggaggggacccaggatagatccctgaggcatgctaggcacccctgcccaatgcacctgctgacatagaatccccattagcaaatgtgagctgagctccatgctggccagtgctgggcagtggggcagcctcattatttggagaagtcaggtggggcttggagacttaattatccagggaggagcctgcatcctacagtggagggaaggagaagagtaacattttgggccctaccacaggccaagcactttgcatctccttacaccccccacctcccgctaagcccctcaatactggacactgttacagcccctgctcctccccagtgctcacagcaattttctaactagattctagctccactctcagcctcattctggtcattgtgtttcttgccttctttggggcatgtgaccctggcccatgaccaggctgttgtctgctgggtgcctgtctaggccacatgctggtgtggcccatcttggcacctgtgtctatgcaaggtgcatgttgctgtcaagagtgtgtgtgtgcacgagggcctcaggtttcagaagcttttcatgtcaaagaatgggcacaccgctcacgcaaatggtctgccctgtgctccctctgggcatgggattggagggcttccttcagcagcacatgccccatggtattcaggattcctgattcctcaatttcccatgaggccggagccaaccttgctttattgcctctctccatagtttgggggagattgggggagctagaactcctatgtgtgggaagtggctttaacatgtgccactcccgaacccccaaaacgtctgtttgacacctcctgctgagatgtgctgtcaattcccagcacccctcaaaccagcttcctcccatcttaccctctctgaacgctgccagacaaatacctcttggcaaggaggaagacacaggcccctcccaagccccctctaaatctggttctcaggagatgggagccctagggagatgtcccactgcattgactttagatgagcaataactcagtcagtctggaatctttgaagggcaagaacttgtgtggaggacaagcccagaaacccagggctttctgggtcagacaggctggctggacctaagccctcacccaggcacggccaaggtaggtggagtccagccctgctgaccgccccaggccctgcttctctcctccctgtctgaacggcttggctctgcgtgaagactgctgaattccagtattagtcaagtgggtgtgctcagtgacggtattggaaatagctcccaatagagggagagcactcaagataggatctaggatcaaggccatcaaggttattgggagaaggcagaatgcagaagattacggagtgagtccctgcagaggcacttgtctaagtctcaggttataagggctcctggccttctctgggaaactgctttcagagcaggtcagcacacgtctgtcctacgtaaaacacgtggccttgggagggggacacagaaggcctgcttctgagaccttgccatctggttagaaagtgtcatcccaaccctgggtgctgtaataaatgcacacgcatcataaggagaagagagaattccaagaggggagccgggaaggatgtctgaagatgggattgaattcggctttggaggaagggtggaaattaggcaaatttggaaagaaagacctgctagacagaaggaaaaggccaagcagaggtttggagacaggaatgtgttggggtgttggggaaaggccggggggtggtctagagcaataatttattaatagaagacaaagtttgaaaggtcagaggaatatacatttgggaagaacataaaggctgtgttgggaggttagacgtcttcccacaggtccatggttttcaaatgaaagtagaaccattttcttcaatgaaagcttatgtgtgaagcactgcacaagtcaaaagtggagagctctagtttaaagtcaaggaggggagcctggagccccaacaccactccccactccaggggaaccctgtgacacacacacagtcatgggtactctaaagaaagtccttggagctgggcactgttgtcacatacctgcagtcctagctacccagaaggctggggcaggaggaggatcacttgggcccaggaggtcaaggctgtagtgtgctatggtcacacgtattaatagccactgcactccagcctgggcaacatagcaagacactatctatcaaaaaacaaaaacaaaggcgtgtgtttgggggagaaattccatggaatcctactgcatgggatgttctgcaatgagttctaaactttattttttaaaaaaatgttttgtagagatggggtctcgctatgtcatgcaggctggtcttgaactcctggcttcaagcaatcctcccacctaagcctcccaaagtgctgggagccactgtgcccaggagttctgaaatttagcgatgtgtgaatggcactaagtttggcttactccaatcattttctttttttttgagattgggtcttggtctgttacccaggctggagcgtagcagcataatcatagttcactgcagtcccaaattccctggctcaagtgatcctcccgccttgtcttcccaaagtgctgggattacaggcctgagccaccatgcccagactccaatcaatcttctattgatgaacatgatcacaaatatgactttttcttatagctgactttgctattaaatgtgaaattgaggccaggtatggtagctcatgcctgtaatcccaccactttgggaggccgaggcggggggatcacttgaggtcaggagtttgagaccagcctggccaacatggtgaaaccttgtctctactaaaaatacaaaaaaattacctaggtgtggtggcagatgcctggaatcccaactacttgggaggctgaggcaggagaattgcttgaacccaggaggcggaggttgcagtgagccgagatcgtgccactgcactccagcctgggcaacaagagcaaaactccacctcaaaaaaaaaaaaaaaaaaaaagtgaagttgaaaaaataagataaagacaaaaagcagaagaaaaccactgcttacaggtgatggggaaccagtaaaggactttaaacagaacattgatgcgatgggatttgtgttttagaaaacttaccctgtcctctgtgcaggaggtggacaggagtagagaagctggtggggatgggacccatggagagatggtctcctgagcattagagtaaagagaaggaagaccagactgaggcaatggcagagggatgctgcgggaagggttggcagatggctctacccttgcactgatgtatctcccacacctccttctcacagaccctcattcccccagagccagaaggaaagacccaggttggagaatgggtctgctcagcattaggagtgagtgtgtgacccacaactgtggctcctgagaggcaagaaagccctgtggcacccagtgtgaccatcccctccttgtgggggtgccttgctctcctgaaatgggggcaccattaagccacccggagcctggtggacagagtaccccatcccatcctctgcctccctgggttcatcatttatagtattgccattttgaatccacataggttggttataattggttttgaattgcctggggaggggcttgggtagggagggtgggaagaacagagctgggaggtgaggaggaacaggtgcaggggacagctgtgagtgaaaggtgtgaaaacaggcacatgtcttcctttgtggttagctgggtaaacaacctgagtgctggggtgatggggggggggtgatggggagaggaagaggaggatggggaggagggaacttccggagacatcacgggcacaccccctgcacttggagcaggctctctccttctctcctgccagtctccccgtgtcgccctcactttctcctgcctctctctgcctctgggctttctgcttctgagtgctcctagctgcagggaggttgccagtgatgggaagtagcagggagcctgcatctgctgcccctagaaggaagcccaggcagggttgttcagtgggaggtactggctttggaagtagataaacgtcggttcacacaaacctgatctttagcaagacacatctgtgaaataggaataatattacataccttgagcgggttgtgcatattgaaccagatgggaggctattactgccatttcagtgataacagagacagtcaggaacaggaagacccatgaggagggagcccacaggccaagtcagcacccgcccgcccctagtccccagcacaatgctaagttgcagtgcccgactgttctgctcagaactggaacagatgggtccttgtaccaagcaggtccattccccaaattgaagtcctgtgactccagccgccaaggctgcaggcttccgtacatgaggacccaaaaacacaagctgacttatggggtccagccctccagcacttacaaagctcagccacccgcacgcctcccttcatcagcaccaccactctaaggaatgcggtccctttgacaggcgaaaaactgaagttggaaaagacaaagtgatttgttcaaaattgaaatttgaaacttgacatttggtcagtgggccctatgtaggaaaaaacctccaagagagctagggttcctctcagagaggaaagacaggtccttaggtcctcaccctcccgtctccttgcccttgcagttctgggaactggacagattggacaactataacgacacctccctggtggaaaatcatctctgccctgccacagaggggcccctcatggcctccttcaaggccgtgttcgtgcccgtggcctacagcctcatcttcctcctgggcgtgatcggcaacgtcctggtgctggtgatcctggagcggcaccggcagacacgcagttccacggagaccttcctgttccacctggccgtggccgacctcctgctggtcttcatcttgccctttgccgtggccgagggctctgtgggctgggtcctggggaccttcctctgcaaaactgtgattgccctgcacaaagtcaacttctactgcagcagcctgctcctggcctgcatcgccgtggaccgctacctggccattgtccacgccgtccatgcctaccgccaccgccgcctcctctccatccacatcacctgtgggaccatctggctggtgggcttcctccttgccttgccagagattctcttcgccaaagtcagccaaggccatcacaacaactccctgccacgttgcaccttctcccaagagaaccaagcagaaacgcatgcctggttcacctcccgattcctctaccatgtggcgggattcctgctgcccatgctggtgatgggctggtgctacgtgggggtagtgcacaggttgcgccaggcccagcggcgccctcagcggcagaaggcagtcagggtggccatcctggtgacaagcatcttcttcctctgctggtcaccctaccacatcgtcatcttcctggacaccctggcgaggctgaaggccgtggacaatacctgcaagctgaatggctctctccccgtggccatcaccatgtgtgagttcctgggcctggcccactgctgcctcaaccccatgctctacactttcgccggcgtgaagttccgcagtgacctgtcgcggctcctgacgaagctgggctgtaccggccctgcctccctgtgccagctcttccctagctggcgcaggagcagtctctctgagtcagagaatgccacctctctcaccacgttctaggtcccagtgtccccttttattgctgcttttccttggggcaggcagtgatgctggatgctccttccaacaggagctgggatcctaagggctcaccgtggctaagagtgtcctaggagtatcctcatttggggtagctagaggaaccaacccccatttctagaacatccctgccagctcttctgccggccctggggctaggctggagcccagggagcggaaagcagctcaaaggcacagtgaaggctgtccttacccatctgcacccccctgggctgagagaacctcacgcacctcccatcctaatcatccaatgctcaagaaacaacttctacttctgcccttgccaacggagagcgcctgcccctcccagaacacactccatcagcttaggggctgctgacctccacagcttcccctctctcctcctgcccacctgtcaaacaaagccagaagctgagcaccaggggatgagtggaggttaaggctgaggaaaggccagctggcagcagagtgtggccttcggacaactcagtccctaaaaacacagacattctgccaggcccccaagcctgcagtcatcttgaccaagcaggaagctcagactggttgagttcaggtagctgcccctggctctgaccgaaacagcgctgggtccaccccatgtcaccggatcctgggtggtctgcaggcagggctgactctaggtgcccttggaggccagccagtgacctgaggaagcgtgaaggccgagaagcaagaaagaaacccgacagagggaagaaaagagctttcttcccgaaccccaaggagggagatggatcaatcaaacccggcggtcccctccgccaggcgagatggggtggggtggagaactcctagggtggctgggtccaggggatgggaggttgtgggcattgatggggaaggaggctggcttgtcccctcctcactcccttcccataagctatagacccgaggaaactcagagtcggaacggagaaaggtggactggaaggggcccgtgggagtcatctcaaccatcccctccgtggcatcaccttaggcagggaagtgtaagaaacacactgaggcagggaagtccccaggccccaggaagccgtgccctgcccccgtgaggatgtcactcagatggaaccgcaggaagctgctccgtgcttgtttgctcacctggggtgtgggaggcccgtccggcagttctgggtgctccctaccacctccccagcctttgatcaggtggggagtcagggacccctgcccttgtcccactcaagccaagcagccaagctccttgggaggccccactggggaaataacagctgtggctcacgtgagagtgtcttcacggcaggacaacgaggaagccctaagacgtcccttttttctctgagtatctcctcgcaagctgggtaatcgatgggggagtctgaagcagatgcaaagaggcaagaggctggattttgaattttctttttaataaaaaggcacctataaaacaggtcaatacagtacaggcagcacagagacccccggaacaagcctaaaaattgtttcaaaataaaaaccaagaagatgtcttcacatattgtatttatatatttatatttatatatatatttatataatggtacaaaatggctgggggtgtggccatggatggagggaagagtaggctggcctgtggcgtgggtgggaggagaggggacggagagggcactcggcccgctgcaatctgacccctctctcctcagggcaggaaacacagagtcagacagtttgggggggtcttgggccaggggtggagggctcaagggcacagggcccaggctgaggcagggcgggcaaagcgcctggcaggatgaagggcaagtggccccccaaacacagaggccctggccatggaccctgggaggtgaccggggtgagtcaggggcctgttgtcagccccagaggaagcgctggacctggccgatggtgggccgagaggacagcaccaggctgggagaagtggggcgagttccctttgtattacagctgccagtgcaagaccaggccctccaggccaggaaggctagggacgggtcctggtagaagacaccctgtctagaatggcccttggtcctggaggtggggcgcaaaaggcctcagccagggaactgccctgccacctcccgaggcaggaaaggaagtgagaaaaggagaagtttttttactcctggggccaaagtagggggacaaacacccagtcgtatatggcttcagctctgaccaaaggcggatagggagctctcctgggtaggagcagggagccaagggggaggcagtggctgtgcctgggtgggcacagacagatctggtacatggccctgagccctgggcagagggacaaccttgccggtgagtgggcaggcagagaggaggcggcaggatgctgtttccccgattccatcctcagggagtggagactggaggggaggtgcactgactcagatgaactgttctcccccttctttgataagaagtaggtggcagcagcctctggaaaagtcagggccctggaggttacctggcccagggctactacagccacaggccccagtggcaccatgccaccccttccatggctccactcaagggggccacacagccaccgcctcttcctcctttccttcatcccaaactgggacaaaagacttcaagttctggctaagatgtagcagcagcggatgcccgggcatccaaagtggaaagccagggccccgtgtcaccggtgtgggcaaacacacatgcacgtgcacacatgttctccctgaatcactcagcagcagacaggctgccgccctgggggtctcagccctgctagggctcaccaggtggaagcctaggtggtctgacctcagtttaggagtgggtcatttacgtcatcttaccatttggggacgagacaggaatggtatcccttagggacccagagacactgcaaacagtgggtggccatgtagggctgcatgtccctgggtccaggggaatggagggagcaataacttgaagaaggggggaagggtttcttttatccttttttttttgtgtgacttctatcaaaacacagaaatacagcacacgcacaaaccagcacaaaagcgcagcgctctatttacagctccggctggcacctgcccacctggccagccgcctgcagggaggggtgggagaggggtcagccacatcagcagggaaaggatacgaagcaggtaaagacagaaggaaaatgggcgggtgcggagaaaccaagagggaggtggagctccagcaatgcggacacgaggagacaggagcagaaggggctgggggagacctgacctgtccttcctctctccccccagattcccatccaggactccaaaagcatagctgaagggggtgtggcgggtgcagggatgcacggaaagaggtaaaatagagaggctccataggaattgggaggagtgggggaggggcagtcctggtggccgaaatggaaccaaccccaatgcaaaatcccccaccccacactgccacttccccctaagctgccagcacatctggtttccacaaatgccactccctacacaagccccctcccaccccctccaccccaccccacgacccaggccatcccaacattgaggggaagaactttgttaaggttatcgtatttgcaacattgccccggctccagccctggcagcgacttctagaagggcaggttggccatgccgcctggtgccgggaggtagcccatctggctgtccagggacacactgcgctgccgaagggggtgggacaccatgaggttctgctggggcggggggcccatgagggagccctgcggggagagcatgtggggcggctggctgtagacctcgccccccacgccccgctgcttcatcagcatgaaattctgctgggtcatgaggccttgtggaggggacatgaccccctggtgcaggccatggggcaccatcccctgctgtgggggcacgcctgtcctgcccagcaaggacatctgtccagggtggcacatggacatgttgagcccccgctggacgccctgctggcctgggaggttgggaggccgagagggagtctgctccgccatcatgttctgcaggttcatgagatgcagattagggggctgagccttggggggctggttctcgctcttggggaagtactggagggtgctgcttggcttctcagaggggatgatcctcgacaagtcgaactcggggatccccgttggggtgggccggatcacctcgctcagctcggggtcgttcagcactgatgccaccccagggagcacacccggtgggtatgcgtcgcccatgcgcccagccatggctttgcccatcaggtgctgctggggaggcatggggcctggcggctggttgggcaggtcctcgggaggcagggccatgcctgacgggtagtgctgctgcaggccaggccccccgcccccacccccagtgggggccatggcaccatggggctgctgcagccgaggggggaagggcatcatctgggaggagctgggcactgggccacagggggcattcagggagtcggggccccctggggccatcatcatggagttttgagggggcccccctgtcccctgtgcgttgggatgcagtggaatgttggagcccagaggggtgggggagggcagcatggcgggcgggggctcatgggacaggggctgctggcctggcaggttcatgcccatagggctctgggcagcggctgagttcaggtgcatctggctgggctggctgttgctgatccctgtagggaatagaagacagggggtcaggcacggtgtgcccagctcggggagggtgcagggctcaggccttccccactcccaagccagggggtgccagaggtcaaagtcttcaccactggcttcccctggctgggagggaagggactggaggcattgatgctagaagccaagagaccaagttctggcccagttcgccagacacaccaccaggtgttggaaagaccactcgagtgctctgggctgggtttccctaatgactccagcgagtgggaacagcatcccggagcctccacccccacacccagggccttcagaggcacaaaaaagccagcacaaccacagctgtgctccccgctcccagtgcccacaccagctggcctccctggggccctggcctgtcctcgcacctggcccggagccctgcggtggtggtggggggggcagcaggggccggtcgggcagcagctcgtcgtctgaggtggcgatggtcttgatggcattgtggtagagcggggtggagctgggcatggcgtacttggacatctgggtcatcatcagtgacagggggttctgggaaggtgtggggtctggggaggaagtgaatggtaggctggggttcatgaggccgctgggagggttggcgggaggtgctgaggagctgctccgggggccgctaggcgggagggtacctacagaaacggggagacaaagagagcaggggtgactggggaggggcagatgagtttggctgtggatatggggaggtttaggaagcggtcagttccccaaatcacctggtccttcagacacacccacaggcccccactatctccagagcccaccagtcttcaagcaattcctgcagcctcagggccccaggcaaggggaagatcccaggccccaagtacgatcactcaaaatgcctgggagactcacgtggtaccccctgagaaagcccacaaatgtcatcatctgccccataagcagagccatccacctctgggcccgtggtacacaggcccttactcactcactgcccagccccagcatggacacactgctcagcgcctgcctgcctgcctgcctgcctgcctgcgcaattgactcaccctgttccatgttgctcagggtggtggaagagttcatgttgagaggcggctgcttgttctgggagacccccgggctgggcatggccgtcttaggtgaggcaacccagcctggagaaggcaccgccatggaaggagacttgagcctgctgggcgagccagtgggtgaacggacactgagggaggagccgaggacctggggcgacttgagaggtcctggcgggttggcagaaggcaagggcaccatctgtgagggagtctggggtgacttgaggttggcagagggcgaggtgaccaggggtgagtgcacctggctaagggtgggcgacttcaagtgccccatgcccggtgagcccatctgattaatactgatggtgaggtccgaaggccgcctgcctagcccccggtttggggctgaatgcacggtcccaggaggattggacgcagggggcagaggcatgtggctgagccgggtggtgcccacgttgctcatgggcattgagctctgatcagggctgaacatgtcttgggtattgcccatgtcctgggacatggcttggtagggtccctggcctccagagaatccctgctggccctggttgggaaactgtgaaggcatcagcatcttctgcgggccgcccatcacgccactgctgttctgggcccgaacccgggccatctcctcaggactgaggccctggggccccatcaagtccccagggccccgcatcttctgcgacatcagcatctgctgctgcggggtcatctgcacgttcaggttcatgttcatgttcatgttgacattcatgttcatgttgaggttgcctggccccatgggtgggtccacctccctcagcccagactgccccatgggagggctcaggaggccccggcctccaccaaactccatgcccatgggagtgcccgccaggccctcaccaccagccatctgcccgggaaacatggcaggatccatctgtcggtgcgcctgcatcatccgctccatctccatgctctgtcccatgccactgcctgccatgcccagggggcgctgcatgcccatcgaccgcttctccagcagctggtgccgcagcagctcctcacggacccggggagtcatgaatcgctccgcctcaccctgcccacctgggtagggcatggtgttctgggcaaaattgctgggtccccccatagggggcaagtcttcggtccagcccatgcctggtctcacgggcctctgcatggcattcatgggcacctccatgggcatactctgcatgcccccaaacccaggtacccgttgtatctggttgcctgggaaacggggcccaggaaagggaggtccgccccggagctgcatgggatcttgaacatccatgggcccccgcagctgcgcacccattccaggtggccactgatccccaggcttgctgtggtaaggaggcgggggccccctcaccatcatgccccccatgcccatcatgtcctgcagaggacggctcccatgcagcccaatctgttcctctttccgccgtttctcttcgtagtactcctcctgcagcttgcgccaggccacctgctcaggcgtgaggctgtcctggcccagcctctgtatcatcatgttcatctgctgccccatgtccccacccggggggtgcccaggcacttcatgctccagcggggggccccctaggctctgtgtctgtgaaatcatggactgcaagggttcctcatatttcttcagcccgctgggaggggccgtgggtggctgctgggggggagggggggcttgtgctggtgggcccccctcacccgctcctcctgggggccccttgaggaagggctcagtctctccgctgcggagcagcagtcgctcaatgtctcgcagcgtctggagggaccgttcccgatgctccagctgctctttggacaagccctctgagcccaccaggctgcgctgcccatttccaggggcggctgcctcccccagcagggcagggccgggggcactgctggggtctcctccaggaggcagagggttgttggcggtggtagccgtcggggtgttagggtgggtgcccccagtcccaccacctgtgctggcagctcccactgagttgggggccaggtcctgactgctgtcctcaggaggcccctctgggggcagagcaggcggggcactgccaggggccgggggtggcggcggcggcagtggaggtggctgggactgcggggtgcctgctgacggcgtgctcaggggtagcggttctggggtggggggcactttaggggcctgcagaaggacaaagagagcatgagacaggtaaggggacgttccacccagtcctgctgctcacagaggcgccacgctcacctggtcaagcttggcccggggcacgttctgctggtggtaggcgaggatggagtcggcccggccctgcagcactgcctctgcagccctgcacagagtgggggcaccgacagctcagagaggtgagcaggagggagccccaccctcacccaccccaccctgcccctgcacggggctccctcggaaccccaggctgagaggtgctgggcagagagagagagagacttggcctgcccaccaggcacttacgtgttggccaggtgggtggtgaagacatatacgaactgcgagggaggctttccggggacgcccccgcccccgcccccgcccccaggggcatcaggccgaaggccaggaggagggccgtgcggggcgcctggcacgctgctctcgctgaggggcagttgggtggtttggccgggacccagctgtggggccgccatggctgggtctgctacattacaatctgcaggagagaggacagggaaaggggctaagtggtctagatacaagaaggaccagctgatgccccctcccactgatgctcacagccttacagctcgtgcccacagggacatttgatgtcagtatctggtgttctcaccaggctggtttccacgatggcaagagtggtgaccatgtggagagcagggacagagaaaatgtgtcctctccacaggctcccatgggcctggcattctgctggggacttaacaggtgtgatttcatctcatcaacacaccctgggaggaacgtgtcacacactccacttaacaaaggaggaaataagttcctcacccacagttacacagccagttagtgcagagccagaactgaacccagggccgggactctgaagctccgctctgagctgctgcccctctcactgggtaagtgtatgtgcacacagtctagtgacccagttagggagaaggcagagagggtacacaagctgatgatccaaatgatggatggtttttcactctagccccaccactaactgactttgtgattttatgaaccagacatccctctaagcctcggtttcttcatctataaaatgtaaaatactaacctcctccttgcacagggggcaggccaaagaaatatattttttaacagtaagtttaaatcaatgtcacagactaaaaaaatccatttgaaaaacagagagccgggagcggtgtctcacgcctgtaatcccagcagtttgggcggtagaggcgggcggatcacctgaggtcatgagttcaagaccagcctggccaacatggtgaaaccccgtctctactaaaaatacaaaaattaactgggcatggtggcgcatggctgtaatcccgctactcaggaggctgagacatgagaattgcttgaacttaggaggtggaagttgcagtgagccgagatcacaccattgcactctagccagggcgacagagcgagactgtctcaaaaaaataaataaataaataaaaataagaaagaaaaaacagttagaaaaagctgacatactggaaacactctcaagacagaccagctgccctcagcaccaagggaagttttgttccatggttagacacttgactgtaagtcttagcgtagaaaaaaatctacaacgggtctaggtgagtgggtagacccattcgcatgccaagaaaagcaagtcacagttcctggcccgcagacagtaagtaccagcattctcagttaatgggagacagattgcctgaagttgtctccatccagccagggcagtgaccaccttcccatgggcccagtgtcaggctgccctctttggaaaaagtttcttctgcaccttcttctctgatggacccaccccaaaacggccctgctctggaccctatctatccaattttacatagaagagcagagccagaaatttgcgggggagcttgagagctgacctcaatgtgtgaaggctgctgagtagctcttggatacgagctatggggagacaggcagggcttagtccaacaaggaactttctagtacaataacaatgataaaagctaacatgttacatgtataacctcatttactcctcataccaaccctatgagataaataatacttttacagatgaggaaactgaggccctttcccaaatttacagaaataacctgggttgcaaacgaaggcagcctgatggcagaactagtcctgtcaatgtctacgttctatcgcccctccagtaagaactcttcaagaatctaagggcaggccgggcacggtggcttatgcctgtaatcctaacactttgggaggccgaggcgggcggatcacttgagggcaggagttcaagaccagcctggccataatggtgaaactccatctctactaaaaatacaaaaattagccaggcgtggtgacgcatgcctgtaatcccagctacttgggaggctgaagcaggagaattacttgaacccaggaggtggaggttgcagtgagccgagattgtgccactgcactccagcctgggcaacagagtgagtgagactctgtctcaaaaaaaaaaaaaaaaaaaaagaatcaggccgggtggctcacgcctgtaatcccagcactttggggggctgaggcaggtgtatcacctgaggtcaggagttcaggaccggtctggccaacatgctaaaactccacctctgctaaaaatacaaaaattagccaggcgtggtggcaggtgcctgtaatcccagctactcgggaggctgaggcaggaaaatcgcttgaactcaggaggcagaggttgcagtaagccgagttcgtgccattgcactccagcctgggcaacaagagtgaaactccgattcaaaaataaataaataaataaataaataaaagaatctaagggtagtacgactaaaatagtcgccttgagtatgggatgttagcaatttctactttgtatttccctatgtttgccaggcacagtggctcactcctgtaattccagcactttgggaggccaaggcatgaggatcgcttgagaccaggagttcaagatcagcctgggcaacatggcaagactgtctctacaaaaattagccaggtgtgatacatgcctgagccccagctacttgggagtctgagatgggaggatcacttgagctcaggagtttgaggttgcagtgagctgtgatcacaccactgcactccagcctgggtgtcagagagagaccctgtctctaaacaataaataaataaaactcacaaagtttctacaatggtgcagtctgatgtgacataagtgaactg

SEQ ID NO: 161 - DNA, 2824 bp, Homo sapiens
gctgccacctctctagaggcacctggcggggagcctctcaacataagacagtgaccagtctggtgactcacagccggcacagccatgaactacccgctaacgctggaaatggacctcgagaacctggaggacctgttctgggaactggacagattggacaactataacgacacctccctggtggaaaatcatctctgccctgccacagaggggcccctcatggcctccttcaaggccgtgttcgtgcccgtggcctacagcctcatcttcctcctgggcgtgatcggcaacgtcctggtgctggtgatcctggagcggcaccggcagacacgcagttccacggagaccttcctgttccacctggccgtggccgacctcctgctggtcttcatcttgccctttgccgtggccgagggctctgtgggctgggtcctggggaccttcctctgcaaaactgtgattgccctgcacaaagtcaacttctactgcagcagcctgctcctggcctgcatcgccgtggaccgctacctggccattgtccacgccgtccatgcctaccgccaccgccgcctcctctccatccacatcacctgtgggaccatctggctggtgggcttcctccttgccttgccagagattctcttcgccaaagtcagccaaggccatcacaacaactccctgccacgttgcaccttctcccaagagaaccaagcagaaacgcatgcctggttcacctcccgattcctctaccatgtggcgggattcctgctgcccatgctggtgatgggctggtgctacgtgggggtagtgcacaggttgcgccaggcccagcggcgccctcagcggcagaaggcagtcagggtggccatcctggtgacaagcatcttcttcctctgctggtcaccctaccacatcgtcatcttcctggacaccctggcgaggctgaaggccgtggacaatacctgcaagctgaatggctctctccccgtggccatcaccatgtgtgagttcctgggcctggcccactgctgcctcaaccccatgctctacactttcgccggcgtgaagttccgcagtgacctgtcgcggctcctgacgaagctgggctgtaccggccctgcctccctgtgccagctcttccctagctggcgcaggagcagtctctctgagtcagagaatgccacctctctcaccacgttctaggtcccagtgtccccttttattgctgcttttccttggggcaggcagtgatgctggatgctccttccaacaggagctgggatcctaagggctcaccgtggctaagagtgtcctaggagtatcctcatttggggtagctagaggaaccaacccccatttctagaacatccctgccagctcttctgccggccctggggctaggctggagcccagggagcggaaagcagctcaaaggcacagtgaaggctgtccttacccatctgcacccccctgggctgagagaacctcacgcacctcccatcctaatcatccaatgctcaagaaacaacttctacttctgcccttgccaacggagagcgcctgcccctcccagaacacactccatcagcttaggggctgctgacctccacagcttcccctctctcctcctgcccacctgtcaaacaaagccagaagctgagcaccaggggatgagtggaggttaaggctgaggaaaggccagctggcagcagagtgtggccttcggacaactcagtccctaaaaacacagacattctgccaggcccccaagcctgcagtcatcttgaccaagcaggaagctcagactggttgagttcaggtagctgcccctggctctgaccgaaacagcgctgggtccaccccatgtcaccggatcctgggtggtctgcaggcagggctgactctaggtgcccttggaggccagccagtgacctgaggaagcgtgaaggccgagaagcaagaaagaaacccgacagagggaagaaaagagctttcttcccgaaccccaaggagggagatggatcaatcaaacccggcggtcccctccgccaggcgagatggggtggggtggagaactcctagggtggctgggtccaggggatgggaggttgtgggcattgatggggaaggaggctggcttgtcccctcctcactcccttcccataagctatagacccgaggaaactcagagtcggaacggagaaaggtggactggaaggggcccgtgggagtcatctcaaccatcccctccgtggcatcaccttaggcagggaagtgtaagaaacacactgaggcagggaagtccccaggccccaggaagccgtgccctgcccccgtgaggatgtcactcagatggaaccgcaggaagctgctccgtgcttgtttgctcacctggggtgtgggaggcccgtccggcagttctgggtgctccctaccacctccccagcctttgatcaggtggggagtcagggacccctgcccttgtcccactcaagccaagcagccaagctccttgggaggccccactggggaaataacagctgtggctcacgtgagagtgtcttcacggcaggacaacgaggaagccctaagacgtcccttttttctctgagtatctcctcgcaagctgggtaatcgatgggggagtctgaagcagatgcaaagaggcaagaggctggattttgaattttctttttaataaaaaggcacctataaaacaggtcaatacagtacaggcagcacagagacccccggaacaagcctaaaaattgtttcaaaataaaaaccaagaagatgtcttcaaaaaaaaaaaaaaaaaaaaaaa

SEQ ID NO: 162 - DNA, 1119 bp, Homo sapiens
atgaactacccgctaacgctggaaatggacctcgagaacctggaggacctgttctgggaactggacagattggacaactataacgacacctccctggtggaaaatcatctctgccctgccacagaggggcccctcatggcctccttcaaggccgtgttcgtgcccgtggcctacagcctcatcttcctcctgggcgtgatcggcaacgtcctggtgctggtgatcctggagcggcaccggcagacacgcagttccacggagaccttcctgttccacctggccgtggccgacctcctgctggtcttcatcttgccctttgccgtggccgagggctctgtgggctgggtcctggggaccttcctctgcaaaactgtgattgccctgcacaaagtcaacttctactgcagcagcctgctcctggcctgcatcgccgtggaccgctacctggccattgtccacgccgtccatgcctaccgccaccgccgcctcctctccatccacatcacctgtgggaccatctggctggtgggcttcctccttgccttgccagagattctcttcgccaaagtcagccaaggccatcacaacaactccctgccacgttgcaccttctcccaagagaaccaagcagaaacgcatgcctggttcacctcccgattcctctaccatgtggcgggattcctgctgcccatgctggtgatgggctggtgctacgtgggggtagtgcacaggttgcgccaggcccagcggcgccctcagcggcagaaggcagtcagggtggccatcctggtgacaagcatcttcttcctctgctggtcaccctaccacatcgtcatcttcctggacaccctggcgaggctgaaggccgtggacaatacctgcaagctgaatggctctctccccgtggccatcaccatgtgtgagttcctgggcctggcccactgctgcctcaaccccatgctctacactttcgccggcgtgaagttccgcagtgacctgtcgcggctcctgacgaagctgggctgtaccggccctgcctccctgtgccagctcttccctagctggcgcaggagcagtctctctgagtcagagaatgccacctctctcaccacgttctag

SEQ ID NO: 163 - DNA, 28430 bp, Mus musculus
  misc_feature (4762)..(4781): "n" at positions 4762 through 4781 can be any base.
  misc_feature (21523)..(21759): "n" at positions 21523 through 21759 can be any base.
  misc_feature (23376)..(23892): "n" at positions 23376 through 23892 can be any base.
aggacctctggaagagcagacagtgctcttacctgctcagccatctctccagcccctaagcttaactttataataaaagatgcttggatatcgtcaagtgctattaactagtctctaaatgttaaagtacaaatgaaatgacagtatggatgagtagaatcaatttaacatgctttatttttttggttgagactggtttctctgtgtagcctttgcatctgggaactcactttatagaccagggtgccctcaaattcagagatctgtctgcttctgcttccctgtgtgccactactgcccagcccatctgttttactttttaaagattaaacagttagatcagcacccagggttaggattataacaacaggtcttttcatgttattaaccggtataattaatgttttcaaatatgagttgaaaatacttcagtacttgtcttaaagctatttgtagacagagataactaaaaaggaatttgaaaaccattccctttgatttgggtggaaacagggcccactggacatgagttagcagctgtcagtgtctcagaagcagttgtactgttggctaattgctttcctttcctttttgagtggcaggccatgtgtctttgctgattctgaaatgttaagacatttcctaccatcaaggtcatagctttttatagaaaggattattgatttctgtactggaacttcattctcaagttcccttcttaaaggaggaagtgcaggagtgagaataaccaaggagcaactctgaaactcttgagagttgttttctctaaccagttaaagaagctgctgttcatctatttacagatactgtggttcctagtataaaatacacgggatactttatttactgtctaggatcaaagtcgatagaaggagggaaattaatagaactcttctaaatttcaagccagtgcgccggtttttgtttgataaagcgaggtaaataaccaggctggagagaagagttgtctcagcagtagtcagcagagttagagtaagtcaagagaatgagcaatttcagcttgagactagttaactaaatgagaagtgttgaattggtaaatacaaattctcttcagattgcatgccttcagagcattctcagaagcgcagagtgcagtgcttcactcagtactacagtactcagttctcagtacaacagggagctgttgacggtcagaatgattttcctctatagtctgagcaggtgccaatgaatgtcacggtcacttagggtcttggctttcaccttcaatatccagtctgtggacacagccttctgggttctactttagagtgtatctgaaaactgactttttcttatcctctggattgttactgtcttggtctcagtggcgttatctcctcgattatagcaacaggcccctgcccatctttttgcttccacccatatcattttttccagtctatctttataaagcagctggagtgatctctttaaaacataaattgttgtcgggcagtggtggcacacacctttaatcccagcacttgggaggcagaggcaggcggatttctgagttcaaggacagccagggctacacagagaaaaaccctgtcttgaaaaaccaacccccccccccaaaaaaaaaaaccataaattgccattcacaaatgaaacccttaattggcttcatttgagggttgttgttctctgaatgaaatcgaaaaacctcatggagcctaaaaagttctcacttctgactctgagtgtctttgccctctatcccagtagggttggccctcctgtttttcctggaacacccaaagtatgtccttattttataattgtaaccatagcctatctatttgtctaaaatgttctctgaatatctatttggttcgcaccttctggacatagttaaaatgtcacttttctagcaagttcttgccgatgggctttttaaaaaaggaatcccggtttcttctggaactgcagattgttttactttgcatttttctcaaaggagtggcattatatttatctttgttttgcccactaaaatataaaattcatcccagtaatttcctcccccagtagtaatttttaaaattgctttgctttaagaggtatgtgacatatatccagtagatatttaaattaatatgtccttaacgagacatatacaaagaaattttagcacattcgggtaaatttccaaatcagttggatttatttcaatgggaaatgcagatgtttttgttcatgtaaagtggatttgttttggggaatatattacaaggttttggctgtgtatactgtgcgtgtacattttggctttatgttgcttgagcatagaggctaatcagactcacatggcttcccatagaatttctgatgagtaaaataacagtaaatacacttgttttaggctttggggtttaggatctatttccttctgtctagaattcttttattgtgcatttgtattctaatgtgctgttttaatttggtgaatactggtataggtcatcacattagggcttatatgacttaatttagagttaaaaggtggaacgcttgatgggagtggattgatgtaagtaagattggatcaaattaaataggactgatctctcttgctgctgaatagctgtattcacatttaaacaggactgtagttgctgtggcacgacatgaagtttgctgagtctttaacaaatatgaaaactgtcttcctggtactgtgttactggcttgctcaaggcagagggactagccctctggaggccattactaataatattgtttggaacctaaattttaagccattagaggaccttgatcatcttagaattttttatgatacatggaatagctaaaaccatttgaaaggtgcgtgttaagaatagcaaattaatgcttctgtccttcagcctcccctcccctcttctctacttccgggaaaccttacccttatctttgtaacatttcagatagcccttgggtttggaagtacccacaaatacatttttaaaagcataccatttattctgccatgcatctttaaagtttgtttgctcagtagtgtctttcatctatctttacctgcttattatagatcttttttttttttttttttttttttttttttttctgtttgtttttcgagacagggtttctctgtagccctggctgccctggaactcactctgtagaccaggctggcctcagaaatccgtctgcctctgccacgcccagcagatttatttttttaagctttgcttagttctccattttaagaatataccctgtatccaggaggtgcacaaaatgcctttaatcccagtactcaggaggcagaggcaagaaaatctcttgagtttttgaggccagcctggcctacagagtgagttcaggacagtcaggacaaaacaacaacaaagaagaatataccctgattaaaggatgggtactggaccatattatacatgttggctgtagattctcatttgggtagatacaaatggtaaaatactgataccaggatttcagctgttttaaacccccagagtggttttttgttttgttgttgtttttgttttgtttttaataattaactaattggtgttttgtgagtatgtgtgctagattccttggaactggagttatagacagttgtaagctgctgtgtgggtgttgggaattgagtataggtctggaaaagcatatccaccgtgccatctctccagcccctgccctcagagttttacatagtccttgtgccattgactggcagtacactggcagctagttaggactctgcttgcttgcctagtcttccaaacccctacatcttttccccctgctctccatccctgctatcttagatggaggggtttctgtcacagaccatgcttttcaattcttctgtgaaaatactcttgctgaaattaaaatgttacataaaaacagacatgtatttaacatacctttttttaatgtatggacttgtctgtggaggtatatgtgagtaagggtggcgctcttggtattgtgactgcctgacgtgctgggaactgagtgatagtcttctgacagagaagcaaattctctgaaccccggagccatttctttaccatcccccccccaatgtaacctttgtaaaattaggctctataaaaggtaggctattttgtgcttaatactatgctgttatttgtcaagtataatgtatcttgttgctagtaagttttttgacatagggtcttgaactccctctctaggtgaggatgccttgaggttttgaggccttatgcctccacctcccgagctgccaaataggactccacttttaaaaatcaagcgctggattttgggtttgccaaaaatgtgttctcccactgagctactttcccaggtcaataatgatttttcttttttgaagtaagtagagtagaattaatgccagacagtttaggaaaaaaaaaattcccctgtatgggacataagagcagtatgtatgtaaatacaggatcctgcagcttttgagcattctagctgtggtaggctatggtggagattatgatttgtttttaaatcaggtttcgctggacagtgatggcgatggctttgggtctatgctgttaagagtcactgctggaagcctatgtggtggcgcatgcctttaatcccagcgctcagggggcagagacaggcggatttctgagttcgaggccaacctggtctacaaagtgagttccaggatagccagggctannnnnnnnnnnnnnnnnnnntcctttgcattaagtgtcaactgtagttaacattagttcagctgaagtgacaggtgcaaaacttgtactatcaatgtgtatgtagttggactcttgggagaagaggtgggacaaaaacttgcttttatcatgtgcctgttaattttgatagaacatactgttttttttttttttaaagatttatttattatatgtaagtacactgtagctgacttcagacactccagaaaagagggtcagatggttgtgagccatcatatggttgctgggatttgaactcatgaccttcggaagagcagtcagtgctcttacccgctgagccaccttaccagcccaaacatactatttcttttggcagaaattctgttgttggaactcctcagtattaagaattgaaaatctaataaaaagttatcgttatccctggaaatggttcttccagagtgaactgggaggaataagaaggcataaagcgtgttttgtttgttcagcagacaaacactggggactaggtagaaagtgtaacgctaggactgaaagcttttaagtctggctgccaggacaatgcaatccttctactgcttctactgatcggatacacagtagctgtgataagcttgagccagaggatccaaatgtgggttagagttccctgtgttttcctgtgctctatgcaagccattgttctgagtagcgttttaatgctcctttcctcagagaagtcatcagttgcagttacttggaaaagttagacttgcatggaaagagaatggaacttgaagaatatgtgggtgcatccaaaatcgaaggaaaaaagtaaccaaggagtcaggagatctaggctcttgtcagtgatttgtttagttaatagtgttggcttgaatacaaatttattctcttgaacaagattttttagtttttaaaggttaggatagaatagtttatctttgcatttctcttagctctaaagctctttgactgtaccaggactgttctgttaaatgtcatgtataaccccaggtacctgtgtttgaggttgcagttacaattgagagttgcaagagtagtcataatttggacagggcctctatgtagccctgcttgtcctgaaacttgctatatagacctggctggacttacagagatctgtacgtagcctagcgtggtttcaagtttctgtgtatccaaggatgaccttgaacttgtgattatacaccccaccttcaccctcagtttcaatgtatagccctggctgctctggaactctctgtagaccaggctgccctccaactcaagagatccgcctgccttcccctccccagtgctgggattaaaggtgtgcgccattatccatgcagcccctccccacccctgactggccaggaatttgctttgttgcgcaggctggccttgaactttgagatctggttgcctctgcctcctatgtgctggttctgaaggctccagagctggggaatactttagaaatgttttgggtttgtgttcatggttatatcgagtgcaccatttataaagtaagaatatctgtaaggaaaaaaactgagactagaagatgtttgaaagtttgtagcccaggttctgtatgtcactttcttccccaaatatgacctacaccaatgtatagtatatccttcataatcttttctatctgttcacatagagcctttatttttatttttctttcagtactgggaacggaacctgaggcctgtgcctgctgggcaagccctctattactgaagtacatccagcacaaatgtttttattgttataaatttaatacggtttttgagacaaggtctaacaatgtaaccccggcttggcctggaacttggattcttctgcttttgtttcccaagagctgggatttataggtctgtgccagtgttccaaaccttttaaattattattttaacttttacagtgttggggtatcaacccagggttttatgcatattaggcaagcatggactatatttttagtcttgaaacttcaaataagtgtttagttactggtgacttatagaagaggcaagagacaaattttagaccattttcctgtttccagaggcactttgggttatatagacaccatctgattgagccagtttgtaatgaaacattaaattgtttgaaagcaccaggcctaaactgatatcatagaagctacaacgtctctgactagtgttgttacagtaatacttggagagaatgctgtggaatcactgaccttcagatagctcctacttgtttgctttttttcttcctggttgtcctgtaactcactgtgtagatcagactggcctcaaactcaagagattggcctgcctctgccttctgaggacgggatcaaaggcctgcactgctgctgccagtgccacccagctttttttgatggggtgccccacatgcatgcagaagaagcctgagaggtcaagaggaggtgattggattgttggaactggagctacatacagacagttaactgcaatgaggatgctgggaaccaaacccaggccttttttggttttttgtttttgtttttgttttttgttgttgttgattttaggttttttgagacagggtttctctgtatcaccctggctgtcctggaactcactctgtagaccaggctggcctcaaactcagaaatccacctgcctctgcctcccaagtgctggaactaaaggcgtgcactaccactgcctggtgaaacccaggtcttttgcaaaagcaacaagaaatcttaatactgagccatttctgtagcctccagaattgtttttttttttggttttgttttgtttttgtttttttgtttttgtttttttgtttttgtttttgtaattagttctggagagatatctcagtcagtgctggttaagtgtactcactgctcttccagagtgaccagattccaaccccagtacccacaaagtaactcacctatcactttaggtacatgatgtaaagacataattcaggcaaaaatacccatacatagaaccattaatattcaaaggaaagaaacaattatattttaaaaggtttgttttattactacttttaactctgtgtacttgtgtgctggcatccttggaagccagaaattttggatctctggaactgaaggcataggtagttgtgagctgctcagtgtgggtgttgtaaatttaaagtcttttgcaaaagcagattaccttctcaaccacggagtcatctttctagtcctaaaattatggattatgtttattagacaggggattactatgtaactctggctgacctagaactccctgtgtagactaaggtggcctcaaacatacagaactccatttgcttctcaagagatgagactaaagttgtatgccattaagtccaacttttttttaaaagatttatttattgtatgtgagtacactgtagctgtcttcagacacaacagaagagagcatcagatcccattacagatggttgtgagccaccatgtggttgctgggaactgaactcaggacctctggaagagcagcagccagtgctcttaaccgctgagccatctctccagcccagtccaaattttttttgggaggaacaaaacttaaattatttgtgatagagttacctatctcactatatagctgtgtagacaaagttggcctaagaattgccatttccctgtctcagcatcgtgggtgctgagatcacagtcatgcctggctgattttgtactcttgaggtagtgatgtgaaaaggaaaacctggaccagaagtgagagcatgtatgtatgtgagagcatgggtatgtatgtgagagcatgggtatgtatgtgagagcatgtatgtatgtgagagcatgggtatgtatgtgagagcatgtatgtatgtgagagcatgggtatgtatgtgagagcatgtatgtatgtgagagcatgggtatgtatgtgagctgaatccacagacagatacagtaaaaacagccacatggcccagttaattcactgtgtgacttgaggcaaatccttttactataccagctcttgtgtgtctgtgtgtgcatgctcgagtgtgtgtgtgtgtgtgtgtgtgtgtgtgtgtgtgtgtgcatgtacaccacgcttgttctaaacttaacaaagaatggccttgaattctgatctttctgcttctaccattcaggcgctaggattactgggtatgtgccatacacccaatttatgagatgctgctgaccaaactaggcttgtaatgtagggaagcgctctaccaactgaactgtatctctagtcctaaaataaaagatttgactgtgcttaatagattaatatcataattggggaagcagttcgtaagatttttataaaatcaaatttttgaagtaaaaatttgttgattatcctcagcttatttacaaatggataccctattttaaacagagtacatgtgaaagagcaagtcaccaaaagcagaaaaatacagtagttttgtgagctgaagttaaaaaagagtccatagaaggaaattttcttcaagtacccttaatgtatgatttgaatgaatttttaagatctcaagacaacgaagaatgagttagacgtgattctaagactggttggtgtttaagatcttgttatgtatgtcactcccccttacctgaatgtttgttacgttttacctgttttggtttcttagagaatctattctttctgaaggcttcatgtctattccgttctgttactcactttattttacctttgttttttcccccaggtttttcgttggaatatacgttgcacatttatggcgattctgagcgtgagggcagacttctgccaggctcagcacagcctttccgctgacaagtgagcttggggttatacgtgccataattaacattgccttgacgactctggacaccgagactggcctcagaagtagtaggcttttttttttttttttttaaattgcaagcgtattcttttaatgactccagtaaaattaagcatcaagtaaacaaaagtggagaagaacctacacttttaacttgtctcactagtgcctaaatgtagtaaaaaggctgcttaaattttgtatgtagttggatttattttggaagctgaaggtatccatctgcagacattgaggctcaagttgaatttggattcaagtggattcttaatacttctgcctgtgctgaagagagaagcttcctaaggaacaagcaagttgaatagagaaaatagtgatcaataataggcattttagtggtctttttaatgttttctgctgcggaacatttcaagatttattgatttcctcctccccccatttttttcccaccacactcacacacgcacgctcacactttttatttgccataatgaaccgtccagcccctgtggagatctcttatgagaacatgcgttttctgataactcacaaccccaccaatgcgactctcaacaagttcacagaggtaagattgtagcatagtctacttttgggattgatttttcttaactatgagtgtttatccttacgttgggttgagttgttaaaatagaatttttgaaagaatatggaatttggggatactatatatagattagtacttataattgtgtgttctttctgtgtttattagtagtactttttgtcatcttcagtaaaaaactcaacatttattgaccacagtatgtactcagcattgcagtaagcactgaatactcttccttttttaaggtcaaggtgcgcatctaaaaccacaggtccgattacttcctccctcctagaggtgataccactcagcttcaaagctgtttagtcatttgcccaaaggctcattgtatttggtggaactagcaccttaagcctgtcatacacactaggacacatgttaaggcgtgggtgagactggtaaaggaacttgtcatgtgtgacaacttgagttttacccttgggactatgagaactgacccccccccccccccccccgttgtcctctgacctctgcacaccataacacacacgtgtcccatatgcactaaatgaaaatgtaataattaaataaactcatacttcgactacaaactacttagtaacagtagttatcacaaatacaggaatccggaaacggggaaggaagtggtcaggagtagtaaaacatggagcctcatttcccctcctttaggtaatgatgacagtgtttactctttaggggatatttaaatgtaaagtttttaatcttttataggttataccatcacatgtggattctgttgctgtgttatggagtagagagagcagtagggggaaatcagtcatcagtcatgttttatgggtggcaaaactgaggccagatagttttaccataaaaaattgtaatggttttctgaccccccccccccaatttttgtggtgctggtgacagaacactgtgcaggtttgcatggactttaccactgagctaccaataccctcaacacataaactttgaagtcttttctcaacttgagtggcactggaaatggagcctggggcctcatacatgccaggaagcagtgccatcaaatatgcccccagaccttctgtgcttgctttttattttgaagtactcactacatttcttagcctggccttaacttaatcctgtagctcaggtggtcctgtggtccttctgtttagccatctaagtaggggagatgacaggtctgtgccactaaaaatactcatttttaaaatttgtagctgggagctggtgagatggatggatcagtgggtaaaggtcctcaccaccaaacctgatgacctaaaacccatatggtggaaggagaggactgaaacttgagtattgttcacaagcacaggcatggacatgaacaaatgtaaatcattggttttcgacgggatctcactatatggccctgtctagccttaaactccagagatcgcctgcctttgtcactggagaaccattcctggcctgtattaactgtttaaaggtgtaactggctacaattgtgtgctagcttttttttttttaagatttatttatttttattatatgtaagtacactgtagctgtcctcagatactccagaagagggagtcagatctcattacagatggttgtgagccaccatgtggttggggagatttgaacttcggacctttggaagagcagccgggtgctcttacccactgggccatcgcaccagccccccctttttaaaaatattatttatttaatatatacaaatacactgtaactgtattcagacacaccagaagagggcatcagatcccattacaggtggttgtgagccaccatgtggttgctgggaattgaactcaggacctctggaagagcagtcagtgctcttaaccgctgagccatctctccagccccgtgtactagctcttttaaaattaattttttgccgggtggtggtggcgcatgcctttaatcccagcacttggggggcagaggcaggcgcatttctgagttcgaggccagcctggtctacagagtgagttccaagacagccacggctacagagaaaccctgtctcaaaaaaacaaaaaacaaaaagcaataggtgattactgcaaaaaaaaaaaaaaaaaaaagaagaagaaaatagccagtctgtggtggtgtacacctttaatcccagtattggtggggcagaggcccatctctgaatttcgggccagcctgatctacagagctagttccaggatagccagagccacacaaagaaatactttctggggggtagggggagatacagaaaggcaaaaaaagctcaacagctgggagtcagacaggcaggtggatctctaagttcaaggaagcctggtctacaaatcaagttccaggagagccagggtggttaaacagaggccctatcttgaaaatagacaacaaaagcaaaataacagaaattaaaaacattaaattgttgttacataccttaggcttctagattttttccctcgtgtgtatattcagaaatacacgtgtaagatcataacacatatttaatatgtttcccccagtctcttgtgttatttctgtagccatcataggattcactgtgtgtgtgccacaccccttttgaagacagtaataaacaacatttctacctttaattattctgttatgtctatggtgaagatgctgtgtaagttgtcctgtctttaatacctgttatatgaagtcctaagaatacagtttttaggtcattgtatatatgaacttttaaaaagtttttgtgccatgctactgaagatgagtatttctccaaggagtctgtgtctgctgtgctcatgcagtgaggtcagtttggagctttgtctaaggatactccctagtttcagtttctcatagcacatttctaaaacccaggtttcagattccaaaagcaagttccctgataactgtttgtctttaaaggaacttaagaagtacggagtgacaactttggttcgagtttgtgatgctacatatgataaagctccagttgaaaaagaaggaatccacgttctagtgagtgtccagtgtctgtgtttgcttgtttctgtgagctcactgacattccaaacactggtgtttgtgaagctcggaactcaaaggcgaagttagtaggcagtttaatagcagtctcctaacggttctttggatcaatcgtgagcagtgttatccattgtgtcctttgagtctacacttgcagtgtagttttcaacaaatgaaaggcaaagttgagtgcacacttatttctaaactgtggaaattggggcctggggagtgcttgctgtcagctcgagcacctgagattgacacgcagaacccaagtgaaaagaccttgcctcaaaaaaattttagggggaaagagggtgggtatggcaacacctacctttaactccagccttgaggaggcactctatgatttcaaggtcatcttggtctacatagtgagttccagaccagctaaggctacaacagtgaggcctgtctcaagacccctcagagatgaagttagcaatagctgggtaggaacaacaggttgttctcagactccagcatgcctaaacacaatgaaatttttggagattcatgaagttacacaataatgaaaagaaaatgttataaaaaaattaaagcaatagctgcctcagtatttaagagcaccttactgtgagccaggcagtcagtggtggtgcacacctttaatcctggctctctgggcacctcaccccccccccccccaaataaatagcctggagacatagtttagttgggagagagcttgcctagcatacaggatgccctgggttcaattcctggaaactgcataaaccagaccaaacacacctgaaaccccagcactgggaggtagaggaaagagaatcaattcagtcaccctcagctacaaagtgagtttgaggtctgcctagaaacatgcgactgcctctaacagtcaaatcccagggctgcattcgccatgtcttcttacaggatctccagcccacagacaaacccagtgttacaatgccaagcaataaaacatttatttatttatttacttatttatttaatgtatgtgagtacactgtaactgtcttcagacacaccagaggaggtcatgggatcccgttgtaggttggttgtgagccaccatgaggttgctgggaattgaactcaggacctctggaagagcagtcattgctcttaaccgctgagctatctttccagcccttgactatgacagctcttataaatgacatttaattggggggcctgcttccaagttcagaggtttattctattattcacattgcagaagcatggcaatgtgcaggcaggcatggtgctggagaaggagcttagagtgctacaccttgatctgcaggcagcaggactagtctttattgagcttctaagaccccccaaagccagcttccacagtgacctacttcctccagcaaggccactccctgtggccaagaattcaaacacatgaatctgtggggccattcctagtcaaacaccacagtcgccaagaggagtaatccatcagtgcactagtgaagaagagaccagtgagactcatttggcatacgggaccagtgggctgaaagcataatagcaatcctcctgctctcagctttcagagttttctctgttttgtctggttgctaccctgaccatataagatttagggctggttaaggtagggctggggggagggggagtggtcagtggtggaatacttgcctagtgttatagatccctagactcagtttaaaatatttgtgtgtatgtatttgtctttctttagatgggtgtgacataagatttcatttgagaagacttacttgacagattcagattttggtcttggatagtttttcagcagtgatcaggaagttgttgagaatagatgtaccggggcagtggtggtgcacgcctttagttccagcacttgggaggcagaggcaggtggatttctgagttcgaggccagcctggtctacagagtgagttccaggatgggtagggatacacagagaaaccctgtgtcaaacacacacacacacacacacacacacacacacacacacacacacacacacacatttaagtaagtacctggttggtggtggctcatgcctttaattccatcactttggagacaggtggatggatctccctgactcgggggtggggggtagggggattaaaatggaataggtaaagtgttttatttagctaacattgtctgccctggctattttcagctcatttttattaggaagtttgtaagaagtcgtttcttttcaggattggccgtttgatgatggagctccaccccctaatcagatagtagatgattggctaaacctgttaaaaaccaaatttcgtgaagagccaggctgttgtgttgcagtgcattgtgttgcaggattgggaaggtaatttactttttctgaattcactctgatatctaaataagccaactcaaatttttaccttggtaggatttgcattcagcaattaaatgatactaaatcaccagaaaggaaatgaggaaatgccagtgtaataagctctaataagagccctttgggttgtgtctggttctacttctaatgccatactgaatgtaatgaaggtcaagaagaagagatttaggtcattaagcgggcaacaaaattaaaattgttttagagattaaattatctgtacatgtttgggtttggattgaaatgaaacaaaatgaagttagttaacaggtagaagattactttaaactcttgagcagaaatgtgtacacaatgaaaattgtttgtgtaaaacttttcactgagcattgcttctgatagttttttgcactttgatcatcagcaggctaaatgccaatttatggtgtgcactgtgcactcagaacataactgtgagatgctgttgcctcaaggtggtggtgacccgtgtcattagttctgcttagcactttagtatggcaaggtttctccataaggttggatgtttaagttcttctgaaggctgatggtggtgtgaggccttcctgggtggctttgtttctattgcctgtctcagtgtagttggaggcagtgctctaacaatgtgcttaagactagagagtaggactgggtggtgttggctcactccttttacttctcagcacttgggaagtagaagcaggtgggtctctgagttcaaggccagcctggtctacaaatcggggatggccagggctgcagagaaaccctgtctcagaaaaacaagaattgagaagctgggggctggagagatggctcagcggttgctcttccagaggtcccgagttcaaatccccgtaaccacatgatctgatgccctcttctgttgtgtctgaagacagcgacagtatacccacataacatacatgaaataaataagtcttttaaaacaatcacaagaattgagaagctgagtacagtggtactgggaggcagaggcaaggactgttgtgagtgtcacgccagcctggtctacatggtgagaccttgttttagaagaaaacattaggtttgcctgcctatcttccaaatgctgggactaaaggcatatatgccactacatccaacacaaactcaagtttgtaatgtgtaagcttttgattaaaacctaaaagtctctgattctaaaggctgtgggcacttacagatgacttctacctgcagggctcctgtgctagttgcgcttgcattgattgaatgcggaatgaagtatgaagatgctgttcaatttataagacagtgagtatgaagctgtatgttcagaaacttgaagcggggctgtgcgtgcggaaggggttatgggaggaatcatttggaagatgcaagcactggttgctttgggcttaagacactgaagattaaaaacaaaagggttaacgcaagtgatcgttgctgctttcataatagcaccaatgcatttccatgtgacagcaggcaaaagcaatgtgtatggagaaacagtcatcacttggtgttctctctctcaagatttatttattttatgtatgtgagtacactgtagctgtacagatggttgtgagccttcatatgattgttgggaattgaatttttaagacctctgctcactctctggtcccacttgctccagtcaagtccacttgctcactcagtccctgcttgctccggctcaaaatttattattatacataagtatactgtagctgacttcagacgcaccagaagagggcgtcagatctcattacagatggttgttgtgagccaccatgtggttgctggtatatgaactcaggaccttcggaagaacagtcagtgcttttaccctctgagcatctcgccaagtccccacttggtactcttgagtggcctgttgtcatacatagttatactggtagtatcccgacagtccgcgccttggtctgaaagaataggccataccgttctttcttagtaaagttaaagcatccctgtctgtcccgaacctaaacctgaggctttgtccttgtatgctctagtttccgtttcgttttgttttttaaagcatcctaatacttgtcattctcatctgaagaatctgttaatctaaaaggaaagagtgatctggtgttcaaaactctgctgatttctgttatactacagtaacaggcagagaaagaaacttgggagggcagaggcagaggcagaggcaggcagattctgagtttgagctgtttacaccacaaattccagaacaactaaggctacagagagaaacactttcttggaaaaacaaaaggaaaaaaaaaagttgatgtttcagctttgtaaagtaatgtgctatggaaactatgtaggctttcagctagggagagctaactagaagtgttattctagacatagctctttgctacatgatagtgcgctgttcttatgttttcagaaaaagaagaggagcattcaattccaaacagctgctttacttggagaagtaccgacctaagatgcggttacgcttcagagataccaatgggcactgctgtgttcagtagaagtagaagcaggctggctggatcgtggcattagagggaactcttggtacctggaaatgtgaatctggattcttacctgtgtcatcagagtagtaatggattcagtactcctcaactcctaatgattgagaagaaggcaaacgataaagaaatccctctattacacgaataaaatgtttaagaaaagaaaaaagaaaggaaaggggattaatttagtgaaagatgattttgctcctagttttgatttctgccaggattgaattatttcaaaatctcctgtgttttttaagctttttcaaaatagatgtctgaggaaaaccagcagaatattaaccagtgtggagccagttgttgggagcacacacttccattatgcttggcacataggtctccttgtggtgggtgggatctgggggaggtagattttcctcatctctcttcctgcctccctcccatctcctgatccacatagatggaatagaaagcagcctttgttgctgtagatgtgcgtgtgtctggcagccttaagcccacctgggcacttttagggaaaaaaacaaaaaaaacaaaaaaaaccaacaaaaaaataaataaaaataaaagcaaagaaaaggcagtggcgcatatattctgtggtccaggctgtttctagtctattgatgatggatgcttatattagttttttttttttttaacccccttgtgcccctgatctaccattagggtgtgagaggtagccaggaacctttggttttataaatggtgacgaaatgacatcctaaacagagtctttctcctgtaatttagctgagagaattctttttcccaacagtgaaacaagtgggcctcctagaaactttattgcagagatgactggaggccattggtgtttccaggagagctagcatgtttctacaagtgtaggactggattgtggatctgctatctaacaatgtcatggaaaagtggtatcttaaaattttaggaccgatttcagaaatagtcaaaggagcaacagaacattcattgtattttggtcttgagaaatgcctatagttttccaaattattcttgtacagttttatttgtacagttcagtgtaaccacctatcatcttgttaacactagattcttctgagattcaaaaagaaaaatcactgtcagagctagccttgcctagtgagtctgtgtccacaggctgtaacagggtggaagagcaacagtaggcagcccagtgagcagcatatgctcacggcatcatgtggcagtggtgtggggtctctgctcagtgtgttgatacagaaaagctgtttttccttgtttgcagaagttgaccagacaaagcaaatggaggggcacctctgtgtaccctcttcacctaagtgtttataaccagcagtaccctgctacaagccttgggtgcagccatcactggattttgatcgtcaggccagcaggatggatgacatctcattgatagtacccagatgttggtggctttctgagttgcctgtttactgttgatgcaattgttttgatttttaactaaatgcaaataccttcctgcctcatcccagaaaatgaaaaataatgcttttgacactgtttctagaattttaaagttgaaaaatgatgatataatccagaaattgttacttcggagcatgacaatagatttctttaacaaagactcaagatcaaatttcttacctaaaagtttaggttaactgttgactcctcaagggttttgatcaatatcacccaaaccttttccacttgacatgctagaattttggtgtgtgtgtgtgtgtatttgttcacgagcacaatagctcccatgggggtctgcacatgcaggtgtccaccagcatagcctgcctgagatagtgtcattcctggttctggggagaagggtgtgtgaaggagaataaagcagccctttgtcttaaagaagactaatgttaattgttctcagaactggatgttttttttccccccatcaaaattaaaactctttcttttggatttaatgaagtattgctaactgaagccagtttgacttgtgagagaggttagactgacagaaggtgtgcagcctgatttacaaccaaaccctgaacccttttgaagaacaataaaacatattttacatgctttttgtgaatttcttccccactcctaaacagttcatgtttgctctcctttctctgcttggcattctcaaggtctgatttgtgtcccattattaatggatacgttagagaggtgaagtgagaggtatttagtaagtatgtacttgaccaatctcattctaaggaattcatttttgttataggtttgcataatgtattacaacttagatttaaataaacctttttgggggagtggggtgggttggggaggggagggggctttgcaagacagggtttctctgtgtagctctttctgtcctggaactcactttgtagaccaggctggcctccaactcagagatccatcttgctcagagatccatcttgctcagccttctcctgagtgtgggattaaatacctgtgctaccactgcccagctctttttacacttttttttttttttttcttttctggctttttaagacagggtttctctgtgaggtctttaaagtggagaattagctgctttaatgtatcatagaatttctctttagtcactggtaaactagataaatttaagcaggacttcaacctaaagaaaacaaagttttagtgggtacaatgagaattttggtttctttaagaacaaatgtgtcaggaatgtttaatcccctatgtgggacttggagctgctttagagtgtccgcaacagctggttgtgatttgcttcatgctccagcaggggagcaattacaccagctgcaggtggtttctgcatgtttttgacattcgcagttctagggactctttgaaaggatatatatggtagatccaatcaaccacttttgctatttgtcaagtggttgtgggtaaagaaatgaaaagaaattggatatcctgactggaacaaacttgcaccaaggaacttggtgcctcaatgccctcttttccctagtgttaggggcttggaaggtagagttgggggtggagggagaagggnnnnnnnnnnnnnnnnnnnnnnnnnnnnnnnnnnnnnnnnnnnnnnnnnnnnnnnnnnnnnnnnnnnnnnnnnnnnnnnnnnnnnnnnnnnnnnnnnnnnnnnnnnnnnnnnnnnnnnnnnnnnnnnnnnnnnnnnnnnnnnnnnnnnnnnnnnnnnnnnnnnnnnnnnnnnnnnnnnnnnnnnnnnnnnnnnnnnnnnnnnnnnnnnnnnnnnnnnnnnnnnnnnnnnnnnnnnnntgcctttccttactttagttctaattggtttttaaacccaagaaacaaggaacctggaaaacagctcagcgggtaaaaaggctgagctcatccctggagcccgtgcttgagagagagagctggatgctacggatagttgtcatcccagcactcctgaggagagagagcgagcagagccagcttgtgatagtgctggatggtctcaacaatgacagctgaaagctgtcctctcactgtcacagtgtgccctggccagtgtgtcccagcgctcacaccaaagctttgaaagaagcttgccaggttacaccttacccagccatctctggtgggcacgcaatgccactgtcttagttactactaccaacatacccagtgtaaagggtcccattctatagtatttctaagatttagaaaagaaaaatttgagtgtgtgtgtgccacatgtgtgcaggtatccatggaaaccaagagacagaattggatcccctggaactactgctgaagaaacgtgggccctctgcagaacctgcaaaagcactcacaccgccaaccaactctccagccacctcccttttatttttttagttttaaggcaagcatttccatcttcttaaatctcatcccttatttgattaaaggttcaaatttaagtgcctttttctgatacccttttcattaacttttctacataattcccaccaacttataaacatactatttattgcatgataagagtcagagctgaggctggcaagatggctcagtggttaagagcgccgactgctctttcgaaggtccagagttcaaatctcagcaaccacgtggtggctcacaactatccgtaacgaaatctgatgccctcttttggagtgtctgaagacagctacagtgtacttacatataataaataaatctttaaaaaaaaaaaaaagctggagttggtggtataaacctttaatcttggcattatttggatagcagaggtcggaagatcacttgagtttaagaccaccctggtctgtgaagtgagttccaaggtagccatggctttgtagagagaacctgtctttatttggtttgaggagttggcaagatggccaccatgcctgagtttgatccttggagcctgtgttgtaacacacaagtgtgtacacgtacaaaagacaaatcgttttgatttcacatctaccttgttctgacacagaaacacaccctgtactgggaattgaacactacagttaaatttctctttaatttacagtaaaactaaacttacattctcctttgagtctgttccagcatagattgttttgtggtttgggttttttatttttgaaacagggtctctataggctggtctataacttcttatgtagaccagacgtcttatttgggatttttatcctctggccccttttaagtgctgggtttcaggcatgcactgccctctctgtctcccagtgagaatttttatttcattgggattgctcctataaagaccaccagaagttctgttgcacttagtttagtggtgggttctcctagtgttggatttgtctacctggtgggattgatgccactgaagtcttcattgagctgggcagttgtgctgcatgnnnnnnnnnnnnnnnnnnnnnnnnnnnnnnnnnnnnnnnnnnnnnnnnnnnnnnnnnnnnnnnnnnnnnnnnnnnnnnnnnnnnnnnnnnnnnnnnnnnnnnnnnnnnnnnnnnnnnnnnnnnnnnnnnnnnnnnnnnnnnnnnnnnnnnnnnnnnnnnnnnnnnnnnnnnnnnnnnnnnnnnnnnnnnnnnnnnnnnnnnnnnnnnnnnnnnnnnnnnnnnnnnnnnnnnnnnnnnnnnnnnnnnnnnnnnnnnnnnnnnnnnnnnnnnnnnnnnnnnnnnnnnnnnnnnnnnnnnnnnnnnnnnnnnnnnnnnnnnnnnnnnnnnnnnnnnnnnnnnnnnnnnnnnnnnnnnnnnnnnnnnnnnnnnnnnnnnnnnnnnnnnnnnnnnnnnnnnnnnnnnnnnnnnnnnnnnnnnnnnnnnnnnnnnnnnnnnnnnnnnnnnnnnnnnnnnnnnnnnnnnnnnnnnnnnnnnnnnnnnnnnnnnnnnnnnnnnnnnnnnnnnnnnnnnnnnnnnntctccctctgtagcttgctctactttgtaggcaaggctagccttgaactcacagagatccacctgtttctgcctcctgaatgttaggattaatggtgtgtgccatcacatctggctttaaaccttaatttttaaaattacatttaattcgtgtatgtgtttgtgggtaccccacagcatttgtgtggaggttagagaacagcttgcaggaattggttcctccacttttgagtcccaggaagtgaggttggattgtaggctgatgccaagccactctatctgctgaaccatcttgccagctttttattttttatttttattatacataagttacactgtagttgacttcagatgcaccagaagagggcatcagatctctttatgggtggttgctagcattcgaactcaggaccttcagaagagtgctcttacccgctgagtcatctcaccagcccatcttggcagctcttaagttttccttttttttttttttttttccctagttacgtaaccaaaagaaaacaaaaacctaggttggcctaggactcccagtggtcctgtctctacacacccagctgtggggctcatggtggcacacacttgtagctagcatttggatggctgaggcaggaggatctaggctacatagggagtccatgtatcaaaaccccaagggattaaacacagcttgttgagtgctgtgacaacctcctgtgagtgagcggtgtgcctgctacgtgtttacccactatcctagccactgaggataccaggggagggaacatgacaaactggcaagaaattattaagggataggagaagaacatttcagttaaacatcagtgcaataagagaacgtgaggaagagcctaggaattagtgattaatgcagtcagacggaatggccatgagaccgaggaagatgaaggaacccgctatatgctgagatatatgaagatggtaccagtatttcccaaggagtttgtgtaaacttgaaaaactgcttggtgtgggttggcatagcagtgcagatcctgaatatggtaaggaaggcaagcaaatttagtgaggttgggaaggtaggttggtgatgctaaggcagggatctcagtaaatgggcagtgtactctctctcacagggacagccttagccatgtgctttgttcaagagatcaatgtctcagcaccagcaatatcttgtttcgtctttgagacagggtcttacatctagcccaggctggctttgaactggctaagaatagttgaggatgaccttgaatccctgatcttcctgccaccgcctcctgagtgctggggtggaggggggacacacgtttgtaccactagtttttgagacaggattatgcctactttggcctggaattcccaccacctgcctcagcctccagagtgctgggatcacagcatcagaatgacacccagcccacacaagtcatctgagtcagagcctctaactgtagattgccgctttctgcagagcagaggcacggaaggtcagtcagtgatcagccgttgcaagatcaggtctttgtgcaaaaggttatgtaagagtcctcttgagttagaggctgtgtgtttaaagggtgactgactcgtactgtgcatgtgggatgtgtcatccaagtggaggagaatgaacaagaaaaggtagaagctgaggaatcctaatggctagtgatgggctgccgtggtgcaggacagaagtttcaggccttaaggaagggagcgagagatgactaagacagacttccttctgcaccattgtgcagatcagtgtgaaaggtcagcagtatattctcagtcagcagttcaaggagatagctgggatgtttggccatggaccgggggtggggtggggtggagtggtggtgagcccttcccacgcccacctatctctcatcctctccacagctcacgcagactgaaagcaattagaatacttcaggcttggcagctttgccatctgccctgcagaagagccactggcaggtgtagcacacagtggcactggttaagtcacttgtgtctgcttggttgttttgaagatagggattcggaaagatggagtagcaagggtctaacagtacccatatctgtctagttcccttgtgctccgggttgtgcctgattagatttagtcttcactggcctcaccaccagtcccatttttaaatgataaactacagcgtaaactgactctaaaattggcccttgactgcccagcttcctaggctgggaagatgtttgttaatgatttcttaggtatggcatcatgcaaaggggtccttgttaattgagctgtgtcgttacattaaatgcaggggcaggagaagggttagcatgcaggtgcacgtgtgtgtgtatagtgagtctgcctcgtcagtgactttaacttgtgtaaaccgtgtgtaatgggccttgccagtaacaaagcagggtatctgagccgagtggtttatagtttataattggcttcttattactgttggctgcctttcctacacatcgagtattactctaggattggtatttgatttaagaaattttcaaattgattttatctcagtgcattaatgcgtggcctcaattcctgcagaggcatcagataaaaccagcctggatgtgttttaggaatcataactggatctgagctgccagtggcccagctctcagtcagcatagataaatccctttgctgaaaaaaaaaaaattctaagtccatcggcttcttagggcatctcaaattgaggccccatgcaactggaaaaatttccccaaataatgctaaaacacataaatgagaatttgctgacatgaatagatctaatcactctcttccttctgggatccaacacataaatattcaaggaataccgtggaaatcagcctaactgtcaagggtgcccaattgtgatgctttccaaaatcaggaaatgcgaaatatgaccctagcaataaaaatgctattactgcggttgagtgcatgggaagctggagtgtgttctgtctgtaatttcatgaggattagcataggtaaatgtttgtaggttttatttttttttccatctctaaaagtgcagaatagattgcagctgtgtggaaatacctattaatcatcttctaatgcttttatgcaaatgcttatatttgactttaatttagagttgccattaacacctggaactctaagattgataacaggtaaaaatttaatgaatgcataaattaaatatttgagtcatatttaggttaatttatagcctctttgttcctggctccacagccccctgataactaaaactcacaggattaggcaggaagagagccctgagtttgtcttatcttttttcttttttcttttttttttttttccgtttttcgagacagggtttctctgtatagtcctggctgtcctggaactcactctgtagaccaggctagcctcgaactcagaaatccgcctgcctctgcctcccgagtgctgggattaaaggcgtgcgccaccatgcccagcgagtttgtcttatctttttgttgttgttaagatttatttatttttatatgtatgctttgctttgctggggtgtgtctgtgccccgtgtgtgttcctactgtccaagaagccaggagagagcatcgggtccactagaacagaactcacagatggctgtgagccaccaagtgggtgctaggaaccaagccccagtactcggcaagagcaggtgctcttgacctctgagtaatcctgtagtcctcccaaccctgaccccattggaagacaggatttcactgtgttgccctagctgggctagaacttgatttatagatcacgctggccttgaacctactacagagttccacctgcctctgcttccgttctttgcaaataaattagctatgctaggtatatgagtagcaagaagattttttggttgttttatgtcctatggatatagatactttagatctttttggggggtgggtttggtgtttgagacagggttgctctgtgtagccctggctgtcctggaactcactctgtagaccaggctggcctcgaactcagaaatccgcctgcctctgtctcccgagtgctgggactaaaggcgtgcgccaccatgcccggctttagatcgtttttatattacttgttttattacattattagtgttgaggtaggttttttcttttctttttctcctcttcctcctcccccctgctcctcccttcctttttgtgtcagagtcttgctttgtaagcctgacttccctctaactcactgtgtggaccagtcactgtggcctttaaccagctctctgtcttttaacctttaatctgtcctcctgcctctgcctcccacgtgtcaagaaacaggtatgtgccatcacatatgggtttttttaaataaaaagtaaaaaattatgtatgtctgtgtttctgtgtttctgtgtgctgttctagggccagaggtgggtgttggaggccccagagctagagttcaagcagatgtgagccagt

SEQ ID NO: 164 - DNA, 723 bp, Mus musculus
agaagcttcctaaggaacaagcaagttgaatagagaaaatagtgatcaataataggcattttagtggtctttttaatgttttctgctgcggaacatttcaagatttattgatttcctcctccccccatttttttcccaccacactcacacacgcacgctcacactttttatttgccataatgaaccgtccagcccctgtggagatctcttatgagaacatgcgttttctgataactcacaaccccaccaatgcgactctcaacaagttcacagaggaacttaagaagtacggagtgacaactttggttcgagtttgtgatgctacatatgataaagctccagttgaaaaagaaggaatccacgttctagattggccgtttgatgatggagctccaccccctaatcagatagtagatgattggctaaacctgttaaaaaccaaatttcgtgaagagccaggctgttgtgttgcagtgcattgtgttgcaggattgggaagggctcctgtgctagttgcgcttgcattgattgaatgcggaatgaagtatgaagatgctgttcaatttataagacaaaaaagaagaggagcattcaattccaaacagctgctttacttggagaagtaccgacctaagatgcggttacgcttcagagataccaatgggcactgctgtgttcagtagaagtagaagcaggctggctggatcgtggcattagagggaa

SEQ ID NO: 165 - DNA, 504 bp, Mus musculus
atgaaccgtccagcccctgtggagatctcttatgagaacatgcgttttctgataactcacaaccccaccaatgcgactctcaacaagttcacagaggaacttaagaagtacggagtgacaactttggttcgagtttgtgatgctacatatgataaagctccagttgaaaaagaaggaatccacgttctagattggccgtttgatgatggagctccaccccctaatcagatagtagatgattggctaaacctgttaaaaaccaaatttcgtgaagagccaggctgttgtgttgcagtgcattgtgttgcaggattgggaagggctcctgtgctagttgcgcttgcattgattgaatgcggaatgaagtatgaagatgctgttcaatttataagacaaaaaagaagaggagcattcaattccaaacagctgctttacttggagaagtaccgacctaagatgcggttacgcttcagagataccaatgggcactgctgtgttcagtag

SEQ ID NO: 166 - DNA, 31236 bp, Homo sapiens
gcacataaactgaagtctttaaacataaaccccatagaaaagatagccatgatacttttgtcacaaaagtatggatgaatagaatccatttagtaaaactatttaatgtaatttttaaaagattaactgaaaacaattagattaatactcaatataaggattgtgctgttaggattttttaatgttattaccagtgctattccaatactttttaaagagaaagtcggcgttggccatagtgctgttaacctgcatttaaattttatttatgaaaggaaaaataccaattttagataagagattcattttgagaattggaaatctttagaggaaaaatggagtacaaaattgtaaagtaaatatttttaagtgtggcctgaaaatatttaatgcaatttttgtcttatagttatttgtagaggtagaaattactagaaaaggacaaccgttaatcaccggggtacatgcacatctaaaaccactcccttttcattttggtgggaacagggcccacaggacttcagtgaataactgtcactgttctcagaagcaggtgcgattgttgactaattgcttcccttatctttctgagtggctggccatgtatcttctactggttttgaaatgttaagacattttcccaccatcaaggtcatgatttctttttatagaactgattattgatttctgtactgggacttgagtctcaagttccctccttaaatgaggaagtggaaaagtgggaataaccaagggagtaactatgaaattttttttttttttttttttttttgagacagagtttcactctgtcacccaggctggagtacagtggcacgatcttggctcactgcaacttccgcctcccaggttcaagcaattctcctgcttcagccacctgagctgggactacagccatgcgccacaatacctggctagtttttgtatttttggtagagacagggttttgccatgttggccaggctggtcttgaactcctgacctcaggtgatccgcccatcttggccttccaaagtgctgggattacaggcgtaagccatcgcgcccggccaaaaaattttttttaacagtaaaaaaagcatcttatttttggcttattcactgacattttggatccttatttgtgtagaattgaattgatacctctttatcaccttcctaggactgtagttattgtgggtaaggagggatattaatattaatattatattgtatataattatattatgctatatattatattattatatttatatattataatatataaatatatgttataatatatatttgttatatataatataatattaatttaaatctaagtttcaaggactagattattttagtttgataaatggaacagtagagggataaacaaaggtaggtagtgcagaggatagatagaactgttgttctatctacttgatttgggagtaggttataagagatgaataaattttcagtttgagaccagttaatcagaagatgcgtgtttactaattaaacgctttactaattaaaggtgaggttttttagtttacaagttttcagacacttttttcccccaagtggtcaaaatacaataggtacagtagcattttacagaggactttccctactactttgatggttgagaagattttacaatctattgtctgaatagcctctgaatattaagttggactccacaagttctgtagttactcagagccttgactgtttttcataaactctatatccagtctgtggacaaatcccacgtcaaagtgtatcttgaaactgaccccttcttatcttccctactgctgttaccctggtctaagctaccattatatctacttgtctccttgcttccacccttaccatttttgtaatgtttccacatagcagatagagtgatcctttgtaaaacctaagttatcactctttttttctctcctttttcagcttttatgttaggttcagtgtgtacatgtgcaggtttgttacgtgggtaaattgaatgtcgctcgggtttggcgtacaaatgattttgtcacctcgtcaccagttagcaagcatagtacctgataagtagtttttcaagccccactctcctctcaccctccaccctcaagtggtccccagtgtctgttgttcccctctttgagtctatgtgtactcagtgtttagctcccacttataagtgagaacatgcggtatttggttttctgttcctgcgttaattcgcttaggataatggcctccagctgcatccatgttgctgcaaaggacatgatttcattattttttatggctttgagttgtcactcttgagtgaaacccttcattggcttcatttggagaggcatcattttctgaataaaagtcaaatgcttttagtggcctataaggctctcttttatttctctgactctattcattccattgtcctctctgttccagtagcattggttcccttgttcctagcatactctaagcttgtccccacctcataacctttgcagcagttaatcctctgcctaaaatgctccccaaatacctgtttggctcacactctcagctcttggataaaaagtcacttttttcagtgaggcctttcctgttagccttatttaaaattggaacccccctccctctggcactgctaattcccctacttctaatttttctccagagcagtgacatttttatttctttttttctgcccagtaaagtgtaagatccatcccaacagaaatttttgttttgcttattgctcttgcacctgtaagagtatgtgacccatagtacatgttctgtaaatatttgaattaatgaaagaatttgaggaaaatgcctagctcttcaggaggataaattctttactgttgacagattagattttttatacttattttaaggggaaataaaagtggctattgacatgaagggaatttgctttaggaaaaaaatgttgcaaggtgttagttgtatattacattattaggctttcatgttgactgattgttgaaaccaagctgactcaaatttgcattacttcctgtaaaatttctggtaagaaaagtagcagtaaatatatgcatactcgttttttttagacctttgcttttagactgtatttccttaaatctagaattcttttattgtacctttatattttaatgtgctgttttaatttggtgaatactggcgtagctcaccaaattagagggtttattgtatcatttaatttggaaatgtaaagggatgatttcttagaaatcctgatgtgagtggattgataggagagataaatatatatatatatatatatttttttttttttttaattttttgaaacggaatctagctctgtggccaggctggagtgcagtggcgcaatctcagttcactgcaacctccgcctcctgggttgaagcgattctcttgcctcagcctcccgagtagctgggattacaggcatgcgccgccacgcccagctaatttttgtatttttagtagagatgggccagtatggcttcgatctcctgacttcgtgatccactcaccgtggcctcccagagtgctgggattacaggcatgagccactgtgcccgccaattgataggaattttaaaaggatgcccggtaaaattgggttaaattaaatgaggctgcttttataaaattcccttatacttctaaattcaccttttttttttttgagatggagtcttgctctgtcgcccaggctggggtgcagtggtgcgatcttgggtcactgcaagctctgcctcccgggttcacgccattctcctgcctcagcctgccaagtagctgggaccacaggcgcccaccaccacacccgactaatttttttgtatttttagtggagacggggtttcaccgtgttagccaggatggtctcttatctcctgacctcgttcgtgatctgcccaactcggcctcccaaagtgctgggattataggcgtgagccacggcgcccggcctctaaattcactttatttgtagttagaattacagttgccaaggcaggacgtgaattttactcatttagcctctttaacaggaaagaaaacactttatggaattgtgtaggtacagacctgcctgggacagaggactagccctctggagcctctttctaatcctatgattatagaactgttaagaacgtagtttgattgtaaatcattatagggttcttatcaccttagaattttttttaaaggtaataccatatgtacatgggaaaagttaaaacagttcaaaaggtatatgttaagatgtagtaaatcgtgctgttgacctccagccttcagtcctgtgttcctggccctgccccaaccctaggaaaccactgttatctcttatctttgtaatcttccagatatcccatgtgcatgaatgcatacagtactcacacatatttctaagcacactgttgatactgtcatgtactgtgcctttttttacttattagtgtcttttagctgtcatttcatatcagttcatacagatgttttctttttaacctctggatagttttttctttttttttatcccttatctccctcctttcttaatttaaaaggacttctctgtcacagactatcctttctcatccttcattgaagttgtattcttttgttaaaaatggaaatgttgcctaggaaatggaaatatcccaaattcaacattttaaaagttaggttttatgataaaattaaatggagagagagtatttgggtgtatatttgaatttaccactgttatatgtcaagtaaactagcctttttcatcacttggtaagttaaaacaataatttatttaagtagatagagcagaattaatgtcagagagacaactttaggagaattttcctgtatggtgtacatgcactgaatttatgttaaaacatagggttctgcaacttttgagtactttctagctgtgataggttgtttatgattttttacacactgtttgctttgcattcctaagtgtgtcacaggaattaacattagtttatctgaattgacaggtgcaaaaatgtaactgttgatgtgtagttgaactcttgatggagggggagggaacagaagcttgtttttatcatgtatctgttaaaagtgctagaacatactgtttcttttggcagaaattcctttgctgggttctcagtattaagaattgaaaatcttaataatgaattatctttattcctggaaatggtctttccaaaatgaggttgggagagtaagatgggataaagcttgttctgtttgctgagcagacacacactggagactaggtagaaaacttaatgctggagctgtagcctttaagcctggctgtcactacaatgcaggtctttcagtgcctttactcagctgacacacatttgcagtgataacgtcattgaaccaaagggattcaaataggttagaatttccttgtgttttgctctgcattgcatgcaaactattgttctttgagtagttactttaataaactccacccagtctcccaccttattttaaggtcgcagagttggagatgaacatccaagcagatatttggaaaaaaaattatacttgtatggaagattgcaacttgaaaaatatgtggggctggacttagtggctcacgaggcctgtaatccctgtgctttaggaggccaaagctggaggatcgcttgagcccaggagttttagaccagcctgggcaacatagcaaggcccccgtctctccaaaaatactttaaaaatattagctgggcgcagtggcatgcacctgtagtcccagctactcaagaggttgaggcaggctgggcgcggtggctcacgcctgtaatcccagcactttgggaggccgaggcgggcggatcacgaggtcaggagatcgagaccatcctggctaacacggtgaaaccccgtctctactaaaaatacaaaaaattagccgggcgtggtagcgggcgcctgtagtcccagctactcgggaggctgaggcaggagaatggcgtgaacccgggaggcggagcttgcagtgagccgagatcgcgccactgcactccagcctgggcgacagagcaagactccgtctcaaaaaaaaaaaaaaaaaaaaaaagaggttgaggcagaaggatcacttgtgcccagaagtttgaggttgccgtgagctatgattgcaccactgcattccagcctgggcgatagagcaagaccctgtctctgaaaagaaaagaagaggctgggtgtggtggctcacgtctgtaatcccagcactttgggaggccaaggtgggcagatcacgaggtcaggccttcaagaccagcctggcctttggtgaaaccctgtctctactaaaaatacaaaaatatgcctgtaatcacagctacttgggaggctgaggcaggagaattgcttgaacccaggaggcggaggttgcagtgagctgagattgtgccacttaactccagcctgggcaacagagtaagactctctctcaaaaaaaaaaaaagataaaaagtatttgggccgggcacggtgactcatgcctgtaatcccaagactttgggaggccgaggcaggaggttggttttcatccaggaattcgagatcagcctgggcagcatagtgaaaccttgttgctacagaaaatcaaaaattagcctggtggtgtgcacctgtgttcccagctcctcaggagcctgaggtgggaggatcgcttgagacaggaggttgaggctgcggtgagccatgatcgcgccactgcactcagcctgggtgacagagtgaaaacctgtctcaaaataaataaaagaaagaaagaaagaaagaaagaaagaaagaaagaaagaaagaaagaaacaaacctgggtttttgttcttaagctgctaccagttagcagtgcgatcatacttaagccattttaacctctctgagccccaaactttgttttaaattttttttttgacagagtttctctcttgttgcccaggctggagtgcagtggcacaatcttggctccctgcaacctctgtctcccaggttcaagcaattctcctgcctcagcctcccgagtaggtgggaatacaggcatgtgccaccacgcccaactaattttgtatttttagtagagatggggtttctccatgttgatcaggctggtcttgaactcctgacctcaggtgatctgcctgccttggcctaccaaagtgctgagatacaggcgtgagccatcacgcccggccaacttttttattttttaaaaggtcagggtagttgatgtttctgttggttctaaaatttcttgactgtacaaggagtactttatgaaatgttttcctctgtaatctaaggtggctatgttttggggttacagttagaattttgaggtaggaagagcgatggaatgtatttttgtttttagttttgagggtagacattttgtgtttttactgtagcgagtaactcattctgctgtagtattattgaagttcttagaatgccattttgaatttcatttgtgtcttttatattattttagttttatgtttgtgtccgtggttatataatcacaagtatgcaatttacacaataaaatgccataagagtatcataaaaaaagcttgaggatagatgaatagtgttgaagctttgtaggcctagctacttacctatatatttcagtttcttcctgaaaatggttccgtagtcattatctttcatacctatttctgtctggttacagctattttttagagacttctaaataagcctttattggtaacttagggaaaaggcaagtgaaagaacttaagctttgtccctttttccagaggaatttatgattatgttgatgttctctgactgagccagctgtaaagattactgtgtttcaaagcagcaggcctaaaaataataataaaaattctgtcacttcttgctttgtttttttggtagggattaatgtttggggagaagtgtgtgtgaatcagtgaccttcaaataattttgtattcttgaggcaattattatgtgacaaataataaaaaggtaaactgaaatagaaaggagaggatgaggtttatacattagttgagtcaggaggcatttgtggtacattggaaaaaacgggactaacagaagacttgggtttgaatttgggctcagttaaaaacttccattgtgtgatgttaggcaagtcacttcatttttctgatcttctttcctcattccttatatgttgtaacaactactcaagacttgtgaggaaaaggggaaatgatttttaaaaaatcaattctttatttacgtaacaagttggttatgtccactgcattgtgtgaaacattacagtatcatataggaaagtactgtcagtacagtgttggatcacaggattttttgagagtgccttatgagttagtctcatcattgagggccaacacatatactttggatagaaagaataaaatcctcaaagtgaaattttgattaatatcctctacccatttataggtacaccttattttaaccaaagagtatatgtgaaggacctaaccatcaaagcagaaaaataaggagatctttgtgaagtttatgaagagttcatgggccaggcgcagtagttcacgcctgtaatcccagcactttgggaggcctaggcaagcgaatcacctgaggtcaggagttcgagatgagcctggtcaacgtggtgaagccccgtctctaccaaaaatacaaaaattagccaggtgtggtggtgggcacctgtaatcccagctacttgggaggctgaggcaggaaaatagcttgaacctggggggcggaggttgcagtgagctgagatctcgccattgcacttcagcctgggtgacagagcaaggctccgtctcaaaaaaaaaaaaaaaaaaagttcatggaagttttaagtatctagtaatcatttaaaaattatttgagttaaaagtaatcgagtctctgattttttttgtttttttgttttttgagacagagttttgttctcattgtccagactggagtgcagtggcacaatctcagctcactgcaacctccacctcccaggttcaagcaattctcctgcctcagcctcccaagtagctgggattacaggcatgcgccaccatgcctggctaattttgtatttttagtagagacggggtttctccatgttggccaggctggtcttgaactcccgacctcaggtgatctgcccgcctcagcctcccaaagtgctaggattacaggcatcagccaccacacctggctcaagtctctgattttttttttttttttttttttttgaggcagagttttgctcttgttgcccaggctggagtgcaatggtgccatcttggctcatcacaacctctacctcccgggttcaagcgattctcctgcctcagcttcctgagtagctgggattacaggcatgcaccaccacacctggctaattgtgtatttttagtagcgacggggtttctccatgttgatcaggctggtctcaaactcccgacctcaggtgatctgcctgcctcagcctcccaaagtgctaggattacaggcatcagccaccacacccggctcgagtctctgatttttaaaactcttcataatacccctttatccaattcttcatagatggtaataacgtataattggtgacatttcacatcgctttgggcttataaagaatgtattttgacttcaggcatttgtgtttactgtgccatcagcctctagttcattttacttattcttttcttctccaggtttttcgttggaatatacgttgcacatttatggcgattctgagtgtgagggcagacttctgccaggctcagcacagcattttcgctgacaagtgagcttggaggttctatgtgccataattaacattgccttgaagactcctggacaccgagactggcctcagaaatagttggctttttttttttttaattgcaagcatatttcttttaatgactccagtaaaattaagcatcaagtaaacaagtggaaagtgacctacacttttaacttgtctcactagtgcctaaatgtagtaaaggctgcttaagttttgtatgtagttggattttttggagtccgaaggtatccatctgcagaaattgaggcccaaattgaatttggattcaagtggattctaaatactttgcttatcttgaagagagaagcttcataaggaataaacaagttgaatagagaaaacactgattgataataggcattttagtggtctttttaatgttttctgctgtgaaacatttcaagatttattgatttttttttttcactttccccatcacactcacacgcacgctcacactttttatttgccataatgaaccgtccagcccctgtggagatctcctatgagaacatgcgttttctgataactcacaaccctaccaatgctactctcaacaagttcacagaggtaagattgtggcatggtctactttttggattgatttctaggtaaaatcccattaaaaaattctcttagcacaaagccatttattctgtatttggagtcatcctgccaatcctggtttgaattgggttgggttagttacagcagattttttcaagaacattttgtgaaatttggggactgtagagatatctagtactgttttctctgtgttctttctacatttattgacaggtttttttggtcaaacattcagtaatgataattaacatttattgaccacgatatgcacttagcattataacaaacaatgttacacattatgcaacgagcagtgtttgtgcttaaggtcacaaatacaaaaaccctatgaggtgtagctaccattatttccctcttaccaatgaggaaacaggttcagagccatttagtaatttgcctaatggcacatagtatgtggtggaactaatgtacttgcctaggtgtctgacactaaaaaccattctgtatgtacttcagatattctaaccacctttgatgaaaaggcacccccagactacttcgttgtaataatcgtatacaagggtccagaaacttgggtgaaggaaaggtggtagaggtagtatttttatgtcagatccttaatattttttctattggtaggagaaaaaactctttgtacttctttgagcaagcatttgaacataagtttttttttttttttgggagatggagtctcgctcttcgccaggctggagtgcagtggcactatctcggctcactgcaagttccccctcccgggttcacgccattctcctgcctcagcctccctgatagctgggactacaggcacctgccaccactcccggctaattttttgtatttctagtagagacgggatttcaccatgttagccaggatggtcttgatctcctgaccttgtgatctgtcacctcggcctcccaaagtgctgggattacaggcatgagccaccgtgcccagcccttttttttttttttttttttgagacggagtgcagtggcacgatcttggctcactgcaacctgcacctcccaggtttaagcgattctcctgcctcagctcccaagtagctgggactacaggcgcgcgccaccacacccagctaatttttgtatttttagtagagacgaagtttcaccgtgttggccaggatggtcttgatctcttgacctcgtgatccgccttcctcggcctcccaaaatgctgggattacaggcgtgagccactgtgcctgaccagaacataagctttttaatcattcttgggttgttgagtttaaatgatttttcttgctgtatttatggagtagagttagaaaggtgggtgaactcttagtgattttcattttatagatgggaaaactgagaccaaaagaggatttgacttgcttaaggtcacaaataccataaaaaattttatcgcaacttttcaatgaatggctattacagagtttattttaatgggattttatttgtattttgaaacatttttaaaattcctgacaatacttctacctttcttgagtctgtattataagaaggcctttttgtgaaaaatgaagtcctttagcaattaaaataattttacactttagataactaaatgatggacccttcttataggatatcactgtgcctgcttatttatacttataattccctgagcttcttaactttgtatacacagcgtacaagttgattctacgcctgtatgccctcagattgttcagtcacctttaagcctggctgaattatgtggtactattttcaacctgtggattccttggccatagtctccagaagtggcacaggccactgtcctcctgcaactataaaaaagatattggtagccccttgaagataggtagtcactgggttagggattcaccgtagggagagttttaaaggagcaaggcttctggctataactgcattagctgtctttttaatataccactttttttcttaatttcagaattttatttctttaaaaaaagcatgtttatttcataaaaatataaagatacagataagcaaaaagaatttaacaacatttaattgttaataactggcttctagatgtttttctctgcatatatctgtgtgtattcataaatacacatacagataggatcacactatatattttttaaaatctttccccatcttccttggtattgtttttatagctgtcatagtgttcactatatggatgtgccatacttctttaatcattcccttatttttggaccattaatgtggtttctaatttttcaccattccagtttgtggtgaatgtgctgttacctaaatatttgtatatgtctttaattatttcttttgtataaactcccagaagtagaatttttaggttgcagtgtatgtgaacttttgtgtaagttttcacgttatgctaccaaactgccctttagaaaggtgagtctcacactgccactgagatttcatgagtgtccattgaatatataaccacagtgagaacaattctgatctttgtctaaaaatgatatctcattgttttaatttataatagtagatttctttttttttttttttttttttttttttggagacggagtctcgctctgtcgcccaggctggagtgcagtggcacgatctcggctcactgcaatatctgcctcctgggttcaagcgattctcctgcctcagcctcctgagtagctgggattacaggcccgcaccaccacactcagctgatctttgtatttttaatagagacggggtttcactatgttggtcaggctggtctcgaactccttaccttgtgatatgcccgcctcaggcctcccaaagtgctgggattataggcgtgaaccaccccgcccggcctataatagtacatttctacatttttggctgtaggtttcaaaaacaagttccattataattttttttttttttaaaggaacttaagaagtatggagtgacgactttggttcgagtttgtgatgctacatatgataaagctccagttgaaaaagaaggaatccacgttctagtgagtgtgtagtatttaaatttttcaaaacaagttgtatctttcaaacataaatatttataaaactaggccaggtgcactggctcacacctataatcccaatattgtgggaagatcacttgaacccaggagttcaagaccagcctgggcaatgtggcgagatctcatctgtacagataattaaaaaactggtggggcatgttggtgcacacctgtggtcccagctacttgggtttttgaggtgagggaatcacttgagcccaggtggttgagactgcagtgagctgtggccacaccaccacattccagcctgggtgacagagggaaaccccgtctcaaaaaaaaaaaaaaaaaaaaattaaaaacttggtattaggtgggcacggtggcacacatttgtagtcccagctacttgggaggctgaagtgagaggatcgcctgagcctgggaggtcaaggttgcagtgagccttgattatgccactgcactccagcctggatgagagtaagaccttgtctcaaaaacaaaaacaaaaaaaccctggcagtaatacttttggatttttttaaggttgtagtggaaaatacattattgatagcaatctttcaaattcttttggattaacaaattggcagttttgttcatttgtgctcttaaagcctacaaatcatagtattttcaactaataaaaagcaaaatttagtgtgctcttattttaacaacatgtaaatttgcaagttttattttttaggaaattaatacaatatttagcttttgtttctaggctactaatttgaatataatgaaagtaatttccatcagacattcttaagtccatatggaactctgccactttgcaagtacaagattagttacttaatattttgtggataacttgtaggaggcaaaaaggtgggataagaggatgaggagaggtagaaggcatcctcctccagagtaatcagcatagtttctgatactttttgttaggtttctgaggagctttagtatgattagattttttgtctagctcaatttgagcacaaagtgattggaattattttaaattaagttcctttttagcatcaaaataggctgtttccttatagcaaatgggagcatcagattagttaacattttattctttcttccctaagtagttgtctaagttgtaggagcagcttttaggagcacgtaatgaaatgatcttgtaattttagatgtctttgagctgttggtttgattgtgggaaggttatgtagtaggaagagaactggagattttataagtagttaggaagaacgtaacaaggaagatactggtttaaggttatgttcctgcttcttattgagaggtagttctgtagtctttattatattggtcagtggttgggaaggcagttgatgcaaaaagaataatgacctattggtaaggcagtcctcttatatctgatccatagtttcctcatgtccattttggtgaaaataaaaactaaatagccaaatgtgttttaaaaaaatgtgttttagggccctgtgtggtggctcatgcctgttcccaccactctgggaggccaaggtaggtggatcacttgagtccaggagttccaagactagtggggcaacatggtgaaaccctgtctctccgaaaaatacaaaaattagctggacgtgatggcatgcacctatagtcctagctacttgggaggttgaggtgggaggatcacctgaacccgagaggtcaaggctgcagtgagccatgattgtgctgctgtgctccagcttgggtgacagagaccttgtcagtcaatcagtcaataatgtgttttaatagtttggcatggtaataatttgcttgcagtcaaatttctaaatgactttactgtccactgctggaaatcactgggaatgagtgtaaacatgtcaaatgcagccctgtgtttaaaaagtagtaataaaatttaaacttccgaaaataagctgcatacaagtttattttgctgcattatgaatatgttctctagtgagcaaaaatcaacttgttttgacagatggcagagtgagaaaatgactggattgaccatagtctgtttgagtcagtaatgttggtaaacatctttgtgaaatagaaatgaactaaagaacttgaactagtttgaggaagataatggtaggcctaagatttattccaggcctttaaatttaggtttttgttttgttttaaatagctgtgatctgggaaatgcaaatcaaaagcacaatatgataccaccttactcctgtaagaatggccgtaatcaaaaaattaaaaaaaaaaatagatgttgtcagggatgtggtgaaaagggaacacttgtacactgctggtgggaatgtaaactagtacaaccactatagaaaacagcgtggagattccttaaagaactaaaagtagaactatcatttgatccagcaatcccattactgggtatctacccagaggaaaataagtcattaaaaacaaacaaacaaacaaataaataaatagctatgatcagataaaatgaaaggtttaacttacacttgaaaaaacaagggcatttagccttaagcttggaatttccttttcccagacagagattttaagagttaatctaattttgctaggtgaggagggttttggaacatttcatggtaagaggatatccccaaataaggcctgtcagtcctctgaatgctcttgcaaaccagacacacattggaatagactaatggtggttttagctgtatcaatttgaggttcagatgtttctaaatgattaatgatttttttaaaaatagacactacttatatgagtaagtgaagcatgttttatattgtttcttaactaggtgcattttagggagtattagaggaagtaagctcttgactaaggtactggttttattgctatttacagttaaactctctagtgacatttataataacacagtcctttaattatggggcgtagttgtcaactcaatcatgtactgttttggctaatgggctacatgaagtgttctagtggtgccaataatgaatgcagaatcaatttaatgctctgtcacttttctctttttcctcccctaatatcttaaagtgtccttatccaatctcattagaatagccttatgtttttaaaaaaattcctaacagtgtttttgcatttctatctttgaagcttagatggcaggagggaaggcttgtaaaatgtcagcccccagtccccctcctccactccccatttgtgttggtttcttaggacctcttgctaagtagtgaggaagataaacccctgcctatactgtgaatgctcgtgggattagtcttaattgaaagatagcccaaataggtgaatacagaaagagaaagggatacttgacaaaatggtctccatttgcccaggaccctgtcatgcagccctgtccttgttaaatggggacatatataatttagtaagcactttaaaaatactcactgcttgccttttaataagcacaaagatggtagtttgtttctgttatgatttactaactattggagatttcttatcagataacctttctctaaagatgtcataacttagttatcttgaattataatcttcaattatctgtagagaccaatgagacaccagttggtatgctttgccagagtggacttttaaatcatgttgacatgtgctgtgtcctctgttactttgtcttggctttaattacagttttgtctattatgtctaattactactctattcagatatcatttttgggagaacactagctcttatgactctgatagagatttctgtaagtttttgtaaattcagatgtgtgcgacactgcattgagaagggtaatttatttggcaaactttaatttcaatcctggatcattttacagcaatgatcagaattgtgttaacaataggtatatatagtgcagttagttcagttaggcctgccgtgtgtactgtgtgcaggtattctgtattaggatgttaatcatggagaaaatatcaatttaatgtaaaaggtcatttcttttcaggattggccatttgatgatggagctccaccccctaatcagatagtagatgattggttaaacctgttaaaaaccaaatttcgtgaagagccaggttgctgtgttgcagtgcattgtgttgcaggattgggaaggtaaactcttacctttattaccctttttgtctgaattcattaccatgcctaagttagttgaaagtttcactttggtagacatttgcatatattatactaaataacattaaattacctgaaaggaaaggaaatgagaggaaaaactagtgtaatgatttctcaaaagagcctgttcatttcatctggttgtctgattctgatgccagcctggattgtgggtgttttatttttctccctatttcaagtaatcaaaagttcaggtcactgaaattggcaacaaaattaaaataattttagagtttgatgaatctatacatggttaattttggactgagatgaatgggaagttaatagatagcagatatctgaactttaaactcttgaaagaagatgtatggacaagaattgactttgatcttaaaaccttttcccctgagcattgcttagaatggtgttgcaacgctgtcatcagcagcagattaaatgccaatttaggatgcacactttgactcaaaacattagtgtaggctgccattgcctcaaggtggtgattactcaagctgttagttctgctctgcccttttgtttgctatttccttttttgtagtgtggtactgtttgttcataaggttagaagttttagtccttatcctgaaggttgaagataatgttgtaacgtgagttggcagttttataactagtagctatcctagttttaggtagcccaaaattggtgccctgtaatgggctttataaaaacatcatttcctttgttaaatttttttaaaaagatagaacttcttctagtcatcaattcttgggcattttcctagctcatcaaaaggattttcttgaaaacgtctagcacctttttagcatttgataaggaaatattaaaatcaattggtaatgaaaattctgacacattggagataagtaatatgtttggtcatttattttactgtgataatggctaaaggccaatgaaggatttttgatcatatctagtgatgagagaatttaatatataatgtgatgttttaaagagtaaagatttcttaaggtttagaatttagtgctttactaaaagtagataatcaggctgggcgctatggttcacgcctgtaatcccagcactttgggaggcggaggcaggcagattgcttgagcctaggagttcaagagcagactgggtaacacggagaaaccccgtctctactaactattaaaaatcaaaaattagctgggcatggtggcgggcacctatagtccgagctatttgaggaactgaggcaggaggatcacctgagctttgggaggttgaggctgcggtgagccgtgattgtgccactgcactctggcctgggtgatagagcgagaccctgtcccctgccccgccaaaaaaaaaaatcatagaattaatgatgatgagatatatttactgtattaggcagataccagctactttagtatacaggaaaaagaaagctcatgcgttgcattggtaatatgcagttacaggtttttaaaaatcctttcactccaagacttatggatacttacatacaggtttctttctgcagggcacctgtgctggttgcacttgctttgattgaatgtggaatgaagtacgaagatgcagttcagtttataagacagtgagtatgaagtttttgtgttcagaaacacagaaagcaagatcatgcatgaggaaggaattatggaagggatattcatttatagtatgggataatttgctttttttggcttgaagtattatttgaagatgtaaaaaatttagagcaagtgatagagactcagtacagctggtttccagattcaaaagttttctaatttggacattatagactgtgtccagtatattgttttgagtatctaggaatctcaaaaatgccccttttaatagattccaaataccttccaaatataattctctgttaggaggaggcaagaagaatgtgtagaggagcagttaatcacctgagactcttttttttttttttgagatggagtctcgctctgttgctcaagctggagtgcagtggctcaatctcggctcactgcaacctctgcctcctgggttcaagcgattctactgcctcagcctctcaagtagctgggactacaggcacgcaccaccacgcccagctaatttttgtatttttagtagacggggtttcaccatgttggccaggatgatctcaatctcctgatctcgtgatccgcccacctcggcctcccaaagtgctgggattacaggcgtgagccaccacgcctggcctcacctgggactcttaagtgatctattcagggacaaaatcaggatggtagtgcacagacaggatcttgacattgatctggaataacgaatcatgctattttgttatccagaattctttgacaatttttgtcttgccctttccctttcaacccttcctttaaaaaaagaaaacgaaagtagaaactattctgatctttattaaatggttaatagactataatgacagtcagcaagaaaaatttttctattccttctaggagggcttagaaagttcatgttgcaacttagctctttaagaattgttgtagtatgggaaatatgctggttttcagctgtgtggaattagaaaggctttaggatgtaaataatgcatttcagtgaatcagacagctctttttttacatgataaagtttgccattcttgtattttcagaaaaagaaggggagcgttcaattccaaacagctgctttatttggagaaataccgacctaagatgcgattacgcttcagagataccaatgggcattgctgtgttcagtagaaggaaatgtaaacgaaggctgacttgattgtgccatttagagggaactcttggtacctggaaatgtgaatctggaatattacctgtgtcatcaaagtagtgatggattcagtactcctcaaccactctcctaatgattggaacaaaagcaaacaaaaaagaaatctctctataaaatgaataaaatgtttaagaaaagagaaagagaaaaggaattaattcagtgaaggatgattttgctcctagttttggagtttgaatttctgccaggattgaattattttgaaatctcctgtctttttaaactttttcaaaataggtctctaaggaaaaccagcagaacattagcctgtgcaaaaccatctgtttggggagcacactcttccattatgcttggcacatagatctccctgtggtgggattttttttttccctttttttgtgggggagggttggtggtatatttttcccctcttttttccttcctctcctacatctcccttttcccccgatccaagttgtagatggaatagaagcccttgttgctgtagatgtgcgtgcagtctggcagccttaagcccacctgggcacttttagataaaaaaaaaaaaaaaacaaaaaacaacaccaaaaaaacagcagtgatatatatatatatatatatatatatatatatatatatatatatatatatatatatatatatatataatataatatatatatatatatatatattttccaggtggtttttagtctttactgatgaaagggtgttcatgttagtttcttcaaaaccctatctaatactaggcaaagtagccaagagccttttgttttgtttttattttgataaattagtggagaaatggcattttaagaggagtctcttctcaacttacctgagagtcgaattcttctcttccctaaccaatgaagctaagtggttatcccagaaacttgtcttctaaaagggaggactccaggccatcaataaagatgtccaggcagtgagcgtactttttacaccctgtagaattgtgggctgtagcgttactctgattttctgtctagtatcagagaatgctggtagcttaaaatttttattttaggacttgtactctgaattttcaggaaccgtcaaaggagcagcagcaaattcacatattttcgacttgagaaatgcttgtggtatgtgttttccaaactgccccctatatgtaaagttcagtttaaccactgattgccttgttattactaggttttttgagattaaaaaaaaaaaatccctggtttaaaaccaacaatgatgcctagtgagtatgtgtccacaggccataacagggtagaagagagacatcgtgcaacccaatgagtagtgaagggactgtgttgcttgtgaagcggtgtagtagcatttttgcagattcttggctgggtttagtgtactgatctagaaaagctgtttttctgctcctttgtggaaggcagttatgatcaggctgcatggacaaagcaggtagaggggcaccatcaggggctcttgcactattttcacctctaaatattacgtactcagtagtgccctgcttctagggctctgaatacgggcttaaagtcatcttgtcctgctggaatttgctgtgcagagccataagcctcccattttgttagcgtcagctaggccaataggaacagaccgggaccttgtctcacactgatgatacctcacatgttgaccggctatgtgaactgcctatttcctatgctggagttttgatttttaactaaacgcaaatctgtagattctctcctctcccatcccagaaaacaaaacaaaataatgcttttcgaaattgtttctaggactttaaaacataatggtatatccaaaattctttatttcagaatgcaacaatagattccattaatatagactcaagatcaaaacagcatacctgctaagctaagatagatggtgttgattccactgggttttgatcaatacaataacaaacctttttcctttgacatactctgaattttgttgtttggggggagggggtgtgtgtgtgtgtgtgtgtgtgtgtgtgtatgtgtgtgtgtgtgtgtgcacgcgcagtgtccatcagtatcagtgcctgcctgagttaggaaaattacattcctggttctgtattgaggagaaggatgtataaagcaacatgaaacattagccctccttttattttaaagactaatgttaattgttcttaaaactggattttttttccttaaagcaatttttttcttttcgatttaatgaagtattgctagctgaagccagtttgacatagagagatgtcagattgatttgaaaggtgtgcagcctgatttaaaaccaaaccctgaacccttttaaagaacaataaaacatattttacacgctctttgtgcatttttttcctccatcctcaagagtttatgtctgtgcttataaagcggagtttaagctgggtgcagtggctcatgcctataatcccagcacttcggaaggccaaggcaggcggatcacttgagccccaggagttcaagaccagcctgggtaatgtgttgagtccatctctacaaaaaaaaaatgtttaataattagctgggcatggtggtgtgtgcttgcagtctcagctacttgggaggctgaggtgagaggaacacttgagcccaagaggttgaggctgtagtgagctgtgatcatgccactatactccagccttggtgacagacaccctgtcccaaaacaacaacaacaaaaccaaaatttcacttacatctgttcccctttctttgcctgctattttcaaggactgttttgggtcctgctagtttactgcaaggaggtaaaatagaggcttggaaattcaaagattttatgtcactgaggtgttcaggaagagccaacttaaccatagctgggatacatctagtacattttctggttcagttcttgtatacaaccctgtaggaattcagcatcttgtcaaaggcttggtttataccatagattattattttttagagacagagtcgtgtagtgcttcccaggctggagtgcagtggctattcacagagtcaataatcgcatatactatggccattctgagtagtctctcactgcacccagcttatttataccataggttttggtgaagcattgcaactttgtacttgaattcgtattaaagaacaatgaggaagtaacagctctgtattaatatatcaggatttgggagtgtggaatttccctttcactatgggtaagcatccatccacccaggtaacaacatgctcagatactaggaaaagatacgacactcatttcactttggagtacctcagtctggagggggtgtcagatatgtagacataaaacagttacagtgggtggttatagtactatttatagatcattgatccacagcctgggcaacatggccaaaccccaacttgacaaaaaatacaaaaagtaactgggtgtcgtggcgcactaccatctggactacagtcccagctactcgggaggctgaagtgagaggattgcttgaacatgggaggctgaggttgcagtgacctgatactgtgccactgcacttcatcctgggtgacagcgagacgagtctcagaattcattgatcctgccacttctcttcacctcttttcacttcttcatgtccttcattacctagcttaggttctgtgatgcactgtgacaatcagcttttcagccttgccccatctcttgttgcattgtacttccctggctaaaatccatttttggttaagttcagtactccactttctgtgcacttaagtacttacacaactgaacatgctgattcagtctctctaaggtcatgacctccccgggccaggtggtacgcgcctattaagtctcagttactcaggaggctgaggcaagagaatcacttgagcccaggagttttgaggctacattgtgaaatgattgtgcccgtgaacagccactgcactccatcctgggcaacatagtgagaccctgtcttgaaaactaaagctatgacctcacatgagcctcaaaacctctcaatcctagtacatttctctatcccatttacactttctcttaaatttttaacacctttgccatcctctcagcttatgactttttaaaacttagaaataaaattttcacaagctcctcccatcacatctactcacccacctgcatctgtgctactgtcttttagttactataggcagactgtccttgcccaatttttttttttttttttttgagactgagtcttgctctgtcacccaggctggagtacagtggcgcaatctcagctcactgcaacttccgcctcccgggagcaagcgattctcctgcctcagcatcctgagtagcagggattacaggcacatgccaccaagcccagctaaattttgtatttttagtagagacggggtttcaccatattggtcaggctggtctcaaactcctgacctcatgatctgcctaccttggcctcccaaagtgctgggattacaggcatgagccactgcccggcctgtccttgccctatttaaggcaagctcttccacttgtgtgctaaattccatcccttaacctgttcaaagggcccagaggtgtagccattttccttctctgtcctgctcattaacttttccccctactagatcattcccatgagcttataaacatgctagtattccatattttaaaaaaatccttgtttgaccccgcatctgccccttcagctgtcatcccgcttctttgctcttctctagtacaagttgagaattatctatctatgctctctacttctctcctttgagcttgcaccaatgaggattttgactccacagaacagcccgtgttaaagatcgccagaggctgggtgcagtggctcatgcctgcactttgggaggccaaggcagacagatcacatgaggccaggagttcaagaccagcctcccaacatggtgaaaccccgtctctactgaaaatacaaaattagctggatgtggtggcacacgcctgtaatcccagctactctgggtggctgaggcacgagaatcgcttgaacctgggaggcagaggttgcagtgagccaaaattatgcttctgtgctcctacctggtcaacagagtaagactgtctaaaaaaaaaaaaaaaaaaaaaaaaaaaaggatcaccccgatcgatggtcaattctcataacttttttttgagggtcttgttttgtcacccaggctggagtgtagtggcatgatcatagctcaccgtaaccttgaactcgggctcaaacgatcctacctcagcctcctgagtagctaggactacacgtgcatgtcactgtgcccagctaattaaaattttttggttgggtgtggtggctcacatctgtaatcccagcacttcgggaggccgaggcgggcggatcacctgaggccaggggttcgagaccagcctggccaacatggcgaaaccccgtctcttctaaaaatacaaaattagccaggcagggtgatgcatgcctgtagtcccagctactcgggaggctgaggcaggagaatcgtgccattgcactccagcctgggtgacgagcgaaactctgtctcaaaaaaaaaaatttttttttttttttttttttggagagacatagtcttcatagcctttatttatttatttatttaggacatggagtcttgctctgtggcccaggctggagtgcagtggcgcgatctcggctcactgcaatctctacctcctgggtttaagcaattctcctgcctcagcctcccaagtagctgggactacaggcacgtgccaccacgcccagctaatttttgtatttttagtagagatggagtttcaccatgttggccaggctggtcttgaactcctgacctcaagtgatccctccacttcggcctcccaaagtgctgggattacaggcgtgagctaccgtgcctggccaaaacatagtctttttatgttgcccaggctggtcttgagctcctggtctcaaatgatccccctgcctccgcttcccagagcgctgagatgatgagcatgagccactgtgcccaccttcataacttctttgacatgtcagcatatggtacagttgaccacttcctctttgaaatgcttcatttgcatgtaggaaaataatgcccttctcccctaaccccccctcaaatgtccaggttctaaatccctggaacctgtgaatgttatcctacatgtcaaagggactttgtgggtgtgattaagttcggaattttgagatgggaagaatatcttggattatcttggtaggcctgatctaatagcatggatccgaaaagcagagaacctttcctagctgaggtcagagggagatgtgtctaggatagaaggatcagagatttatttgaaggtggagggaaggggccaggagccaaggagtgacggcagcctcgaacctggagaaggcaaggaaacagattcgcccaacagcctccaagaaggaacttagcctgctaacaccttgattttggttgcatgtaggatttctacagaactgtagggtaaatctgtgttgttttcagccacaatgtttgagataatttattatagcaccaatagaaaacgaatacaggtttttgcctctagaacactacactcctgagttttcacctagtttagttgccacacctcagtttcggtttctggttcctcattagcttctacacttctgttctatctccctggactctattctctggattctagacccatatccaatacctccctctcatctctcactgatgtgtcatagtggaaacttaactttaattcttgctcaaatgttagcttgagtgaagctttccatggccaccctatttgtcccactaagctttagtgtcctctgtaatacttaccaccatctcacaagcttcttttttttttttttttttttttttttaaagtttcactcttgttgcccaggctggagtgtgatggtgccatcttggcttactgcaaactccgcctcctgggttcaagcaattctcatgcctcagcctcccaagtagctgggattacaggcatgtgccaccacgtccagctaattttgtatttttagtagagacagggtttctccatgttgatcaggccggtctcaaactcccaacctcaggtgatacgcctgcctcggcctcccaaagtgctgggattgcagacaggtgtgagccactgcacccggcctcgaccttttaattatttgtttcccccaccaaaatataagctcaacaaaggcatagctgttttttgttttgtgtttcgttcaccgtatcttcagcacctcaaatagtgcttggcatgcagcaggtgctcagtggatactgaatgaatgggtatggatagagacatagacgaattatggtactgtgatactagggggtaactaaaactgccctggagcacatcaggagatgctgcagtgggcatgtttgagctggattttgaaggatgagatagaaaaggttgatacacaatgagatagcatgttccatccatcagaatggctatcataaaaaagatggaccataacaagtcttgggaagggtatgaagaagttggaacctttatacattgctggtaataatataaagcgatggtgcagtcacttttgaaaaacagtttggcagtttctcaaaaagttaaacacttgccatatgacccagcaattccaatatgtacaattttcaattctacatatatacaagggaaatgaagacattacggttacatgggctagggcggggacagggtttctttctgtggtgataaaagtgttctgggattagacagtggtgatggttgcataacagtgtgactgcattaaatgctgctaagttgtacacttacaaaaaaaggttgatgtggggacagtacatttcaggttgaggaaataatacaaggcagtggaagtatgaaagagcatggtatttttgggagaaggggcaagatttggtctctctggagggtttggatttgtgctaggcaggtttggttgtcatcagagtagaagaggtactagacaccccttccttgtacctccccgtctacccccgaggccatagatgattggatcagggatagacagttgactcaactgctgacattggccagcagattctcgtttttttttttttttgagatgtagtgttgctctgctgcccaggtgggagtgcagtggtgtgatctctgctcactgcaacctctgcctcccgggttcaagcgattctcctgcctcagcctcccaagtagctgggactacaggtgtatgccacgaggcctggctaatttttgtatttttagtagagatgaagtttcaccatgttagccaggctggtctcgaactcctgacctcaagtgatccacctgcctcagcctcctagagtactgagattacaggcgtgagccaccgtgcccagcccagattctcaatttcaactgaggtagactcttggatgtgaggggccagtagggccatgtgtatgttgggtcatatgtgagacgagtagacataggacagaggaaggaggacggagaagcagcccaggggagcagagagaagagactgtggcctgggattaggggagcaatgcccctgaattcagagttctttttcataaagcccagctgcacgtcgtcccctgaagtcctttcgatggtttctgtcccttccctcgccccttgtttaaaatagcttgagtcagtttcttaataaccaagagagccttgactagaagggattatacaaatagcatgttaaatgctgtgactgaagctcctataggtagagtggtgatttatgctacatcctatacactattctaggcactgaggatatagtgggaaacaagaaacacgctctgccctggtagggcttacattctactggagaagacagagaataaacaggtacacaaattagtaatctattttcagatagtgattgcttgagctcaggagtttgagaccagcctggctaacatggtgaaaccccatctctacagaaaatacaaaaattagccaggcatggtggtgcatacctgtagtcccaactacttgggaggctgaggtgggaggattgcctgagcccaggaggcagaggtggcagaaagaaagaaatttgaaactttattgatcatttctcaatctggagaagacatcagattcaactatgtggtttattaaaaatgtccacgtccaggtaccacccagatcattctgaatcagtctctagttgtgaatccgctttgggcggtggggagccatgaaggttggtaagcacagcagctacgtggtcagatctattctcagaaagttattcaaggagctccttaaatcagagaccgtacctgttatgtaaacccagttcctgatttgtactatgcatgcaacaaatatcagctgaaggaatgagaatgaattggagagactagaagctgagagacatttatggatggtgggtggatgatagttgcagcagttcaggacagaagtgttggggccttaactaagggagcagcggatggatggggtagaagattctttccttttagccaccagatcccagatctacatgaaaaggtatccagcatatctacatgctaatttctttctttgtttcttttttctttttttgagacggagtctcgctctgttgctcaggctggatgcagtggcacgatctcagctcactgcaagctctgcctcccgggttcacgccattctcctgcctcagcctcccgagtagctgagactacaggcgcccgccaccacacccggctaagtttttgtattttcagtagagacggggtttcaccatgttagccagggtggtctcgatctcctgacctcgtgatctgcctgcctcggcctcccaaagtgctgagattacaggagtgagccatcgcacctggcctacatgctaatttcaaaggattaatttacagggatatctggccatgggaaagatttgtaaaaccgcccctacctcttattttctccacagatcacacttgcacatgaaagtaaatagaatcctcttcactacttgcaaccctgctaaccaccccaaacaggttaacagaagtgtgatattagccatgttacttctgtttcctttgctgttttggggtctggcagtcaggaagatagagaaataaaatgataatactggccatcatctgttgagtactactgtgctcagaatttcatgtgcatgatctaatttaatcttcataggctactacataggcttcatcattgctaatcccattttataaatgagaaaatcaggaggtgaagtaatagcaagttggtggcaggggcagtattagaatctgggcctgggccgggcgtggtggctcacgcctataatctcagcactttgggaggccgaggcaggtggatcacctgaggtcaggagttcgagaccagcctggccaaaatgatgaaaccctgtctgtactaaaaatacaaaaaattatctgggcatg

SEQ ID NO: 167 - DNA, 1526 bp, Homo sapiens
gtttttttttttttttttaattgcaagcatatttcttttaatgactccagtaaaattaagcatcaagtaaacaagtggaaagtgacctacacttttaacttgtctcactagtgcctaaatgtagtaaaggctgcttaagttttgtatgtagttggattttttggagtccgaaggtatccatctgcagaaattgaggcccaaattgaatttggattcaagtggattctaaatactttgcttatcttgaagagagaagcttcataaggaataaacaagttgaatagagaaaacactgattgataataggcattttagtggtctttttaatgttttctgctgtgaaacatttcaagatttattgatttttttttttcactttccccatcacactcacacgcacgctcacactttttatttgccataatgaaccgtccagcccctgtggagatctcctatgagaacatgcgttttctgataactcacaaccctaccaatgctactctcaacaagttcacagaggaacttaagaagtatggagtgacgactttggttcgagtttgtgatgctacatatgataaagctccagttgaaaaagaaggaatccacgttctagattggccatttgatgatggagctccaccccctaatcagatagtagatgattggttaaacctgttaaaaaccaaatttcgtgaagagccaggttgctgtgttgcagtgcattgtgttgcaggattgggaagggcacctgtgctggttgcacttgctttgattgaatgtggaatgaagtacgaagatgcagttcagtttataagacaaaaaagaaggggagcgttcaattccaaacagctgctttatttggagaaataccgacctaagatgcgattacgcttcagagataccaatgggcattgctgtgttcagtagaaggaaatgtaaacgaaggctgacttgattgtgccatttagagggaactcttggtacctggaaatgtgaatctggaatattacctgtgtcatcaaagtagtgatggattcagtactcctcaaccactctcctaatgattggaacaaaagcaaacaaaaaagaaatctctctataaaatgaataaaatgtttaagaaaagagaaagagaaaaggaattaattcagtgaaggatgattttgctcctagttttggagtttgaatttctgccaggattgaattattttgaaatctcctgtctttttaaactttttcaaaataggtctctaaggaaaaccagcagaacattagcctgtgcaaaaccatctgtttggggagcacactcttccattatgcttggcacatagatctccctgtggtgggattttttttttccctttttttgtgggggagggttggtggtatatttttcccctcttttttccttcctctcctacatctcccttttcccccgatccaagttgtagatggaatagaagcccttgttgctgtagatgtgcgtgcagtctggcagccttaagcccacctgggcacttttagat

SEQ ID NO: 168 - DNA, 504 bp, Homo sapiens
atgaaccgtccagcccctgtggagatctcctatgagaacatgcgttttctgataactcacaaccctaccaatgctactctcaacaagttcacagaggaacttaagaagtatggagtgacgactttggttcgagtttgtgatgctacatatgataaagctccagttgaaaaagaaggaatccacgttctagattggccatttgatgatggagctccaccccctaatcagatagtagatgattggttaaacctgttaaaaaccaaatttcgtgaagagccaggttgctgtgttgcagtgcattgtgttgcaggattgggaagggcacctgtgctggttgcacttgctttgattgaatgtggaatgaagtacgaagatgcagttcagtttataagacaaaaaagaaggggagcgttcaattccaaacagctgctttatttggagaaataccgacctaagatgcgattacgcttcagagataccaatgggcattgctgtgttcagtag

SEQ ID NO: 169 - DNA, 67191 bp, Mus musculus
  misc_feature (47049)..(47068): "n" at positions 47049 through 47068 can be any base.
  misc_feature (54343)..(54461): "n" at positions 54343 through 54461 can be any base.
  misc_feature (60604)..(60623): "n" at positions 60604 through 60623 can be any base.
  misc_feature (62084)..(62482): "n" at positions 62084 through 62482 can be any base.
acatggtggctcacaaccctctgtaatgggggatgggatgtcctcttctggtgtgtctgaagacagtggcagtgtcctcatgcatgaaatagatatttctaaagaaggaggaggaggaaagaaataataataataatacagggcatatacagggctaacaggattgttcagcaggtaaaggtgcttgctctcaagtctgataactgagttttattctcaggatatgggggcttaggtggtggtggtaggtgaccaacttctacaggttggcctcttgcctccatttttgcatgggatgtgcctggaccccagcccctgtggctggttaaatgtaattaaaaagaaaataagaaactgggcacggtggtgcacatctttagtcccagcactccagaggcagaggccagcctggtctatatagttagttctaagccagccagagttgcacagaaaaaccctgtctctaaaaacaaacaaacaaacaaaaaagggctagagagctggctcagtggctaagtgttaggagtgcttgttgctcaggtttaagtcatagtgaaagaacctagtggagaaaccccccactcaattccgagttggtgtgcacccaaggaatcacgagagactgtcttgatgcaaacacatgaggtagtttaatgacggagctccgggccgacatgtatctcacacaggagattgcggttgtcgaccactaggcttgaaagctaggggtttttatagaaaagggtctggggctgggggaggaattggcgcggtttcacacgattggttcatttaaacatcagcagagtgtatgtgcagatggaggtaacagcagagcatctggttaacatttaacccatgtcagaagggtgggagatagggaggcgccaggccagtctggacatgtctttgcattctctttatctttatggccaagcagcctcaggaatgtcttaatgatgggcctgcccaggcatgtcctggcctgttctgctatgttctcagtcccaggcttcaaagctcacaaacaactctttgggctattacatgaatcacaggactcaagttttattttctttcaatagcaccacatggcaatccacaactctctgtgactccagttccaggatagtcaatgtcctcttctgacctccaagggcatcaggagtgcacacataaatacacacaggcaagatactcatacttataacattttataatcataacaaggcccaggtacatgtgaggtccacatgcatgcacgtgggcactgcaggctgtgtaagtatgggtatttacacacgctgtttacaaagcactgttcgctccgggagggttggatggttgctctctctcctccatctccaccccagcccatcaggtagagaagaatccataaagacagacctgtctttcagtgcgccttggggtgtggttccagagaaacttggttttgttaaaagcaccagttaaagagctcacataatttccttcctagatgatgtttctaacacgattttcctctcatatgattattgatctgatagaaggaagatatttggcagatgttttgtctcagatggcctggcaatgctgggctaacaaggaggaagtagcctgggagcatcctggctctgggagcaccatcagcctctggaagctatgggagtgtacatggacccaccctcacacacagtcttccccgtccctttcaagcctgctgtctgaggaccacctgtgggagactaaagagtctgagcaggccctgtagtgggcttagggggtccccagtgactcagggaaaagcttctcctggccatgccccttaacagtggtgacagggactgcaccactgtgcacaactttactctgagaagatgcacagtacgccccagagattttaaagatggctcaagtgtgtgagcggccaatccacagagtccatgaaactctcatcaagatcacaggccccagctggagagatggctcagcggttaagagcactgactgctcttctgaaggtcgagttcaaatcccagaaaccacgcagtggctcacaaccatctgtaatgagatctgacgccctcttctggtttatctgaagacagctacagtgtacttacatataattaataaatctttgggctggagcgagcagggccggaacgagcagaaatcctaagttcaattcccagcaatcacacgatggctcacaaccatctacagtgtactcatatacataaaataagtaaatcttttttttattaggtatttagctcatttacatttccaatgctataccaaaagtcccccatacccaagtaaatcttttttaaaaattaaaaaacatcacaggcccttcagggaagtgagggacgaaatgaaatctggaataaacacaaagtgaggaagccccaagtgaggatgctgtgcctcctggaacagggcagatagtgccccctcaggcttggagtcatcataacaatgtggctggactcagagacagctgctgaccaacccacagatttagggcagctgagcaacaggctgggaatgtggcagagccttgccaagcctgacaagatcctggattccatgcccagagctgcaaggtcaaaccaaaccaaaaacaaaaacaaaaaaaaaaaacaaaaaaaccccccaaaaaaccaaaaaaaccaaaaaccccaccaaattaaaccagaaataccaagcagagaaaaagggaaatagaaaaatgaagggcacagaagcagtcattccttaaggatgctcaaaggcgaggaaccagttagatggccgagaagaagggaacaggctggcataggtgtatatgcgggtacacccagcagaggggtcaggaaaccctatctaggttcaaggtccctggctacctgctgggaagactctcgtgatccagatttgcacagacatttgcatgttgctttgaactagacttcaggtcaccagaattccatgttccaggccttgagcagaactaccatgcctctaacagccaataggggagccccagtggcaggactacggtggcctgcaggatgtcagtgggatggcaaggctgacaaccagagttccatctctggggacaaaataataaacgagagagacatctccccccagctgaccaccccaccccccgcagtgggaaatgtgtacccacacatgacacacaccaaataaaatcctttttttttttggtttttcgagacagggtttctctgtgtagccctggctgtcctggaactcactttgtagaccaggctggcctcgaactcagaaatccgcctgcctctgcctcccaagtgctgggactaaaggcgtgtgccaccactgccctgctccaaataaaataaaggtcatctaaaacaattacaaacagcaacacagatgggggacactcctgactctctggccccaggagacaaggtctgtgggctgtcccgtggtgtctgcagccaacagcttaagaaaggcgagggcacaaggtgtccttttgggcttgctggtctgcaggcgcctcctcctaggagaacaggcttcagtgttctggcacgttcctcccacttcagggagacaaggcaatctgcccagactctacagctagaaacccaaagaagcacaagagcgtccatgtttcttctcttagaacgcctgattctgcttacaacagagtccgcatagatttctaatcagagtaagggctgacaggcacttccttggtacttggtccactcacagagtgaagctgtagtgtgggctgaggccctccagggcaacaggaccagcagagatccactgtggaggtaaaaaggccagcttaggaagtttgggaaggtcatgaaacacttgcccctccagaaggaagaggctaattaacatttctcagaccttagggcagaactgccctgtgggtggggacacatcctgcaggacaccttcagacaagggacgtccttgtcacttcattccctaaagaccaatcagtttaaagggtgcactgctccgccaatcacgttgtgcctagttgctgatgctctcttctgcccctggaaaccatataaaaactccctgaatgggtgctgggggtcgccgcctctccttcgggtctgggaagaccccagtgcactggaacaaaaattcctcttgctttttgcatctattccggctccacgtggtccactcaggggctccctggtaagcagaggctccctggagtcttgcagagggacgggactctgtccaacaagttctctgtctcaaagctctgtggcatcagtagaggcccctgctcaggggttggagcctagctcccgtgtagcggctcagctcctccagcaccagcttctcctggttgtacatctggaacacagcagagcacaagctctggagggactctggggacccttgtcccgagtccgagtcctcccagggttcacctccttctgaagcccccctagccgctcccccaggctctgcacaagtctatcagcagcacctgaacagagactcagagagctgtaggtagatgcaagatcaaaggacaggacagcagggagtgggctcccaaaggaagggggagaagctggggtacacatggggcccagggaagtgtggggcagggagggagtgggcatagacagggctgggtggtagcagaagcagactgcgatctacttttaatttgaaaaaaaaagttcattcatgggtgctggagagatggctcagcagtggagagcactcactgctctcacagatcgcctgggttcggttcccagcacccgtatcaggaagctcacaaccagctgtagttccagtttcaggggatctactccttcctctgcctctgcagataaccagcacacacattacctacaaacgtaacccaagcctattggacaacgtagtgggctttaagtgtggtacccattggccgttagaagaaaaaaaccatgacttagcattatttgttgccaactgatgggtaagggttttttttattattttttattttttgtatgtttttctgaacattaagtgtcccttgacccccatcgataatagctagcattcagggaatttaactttcacctgcctgtccagggtgcctttcaggagtgaagtatcatgaggagccagagccttcaatacaagacctcacctttccaggcaggatggatggaggctgtagttcggcctcttgccatggggtttcgaggtgggggaggggaatgctgggcagcagcctaagggttaagggtgtatctggggtagccccttgcacaggtacccctcctaccttttgccactcggctttggagctgtgggtgaagcccagcaggtgacagagtccatgggtggctgtgacctgttggagtaattgagaagtcagctcaggggatgatctaccagacggccgccccttcgggctcacagaggacccttgtaagactgagttgtcctacgccaggaccctggggcaggatacacagttgctgccctgggttggagttaatactcagttctctcctgtctaggcaagtgctaccagtgagctacatcccaacctctatcgcctcctgtctaaaacagaacaattcattcactcagttcacttaattagtgtggagcaacactgtttggggttgagaccaggtaaaaagagttgattgtccctggcagtattgggaatctgactagatagaattaagcaagggtgaatcacggttgtagtatcagtggtctagaaggttgcagtgaagtattgattgaatccaagagttcaagacctgggtggtatagtctacatcttttcatttatttacttattatttttaaattgtgtatatgtgcacatgagtacagacatccttgcggcctgagaggacatctgataccttggagctgggggcaggcggttgtaaaatacctgacccagatgctgggaagagaactcgtgttcaccagaacagtggctcctgatacccacggagccatccctctaggctagggcgtaaaacaaggtcagggcacctgtgcagagtaggcatggtggtcaggcaaagacaggacaggactcgagtaggtggagggagaggctggacgcagcagaatcagtgtcgcctgcttctaactgcagacaggattgggttatagcccgcacaagaaggggtagaacagagtccagcagagggcactgaagatctgaagagcccagctaatgaagagcctgcatgatgtctagctttggctgaccagaacaccaagatttatagagaggactactgcaagctaagctaaagttatctctagcaatctttagtaccctctaataaccatttactacgaaccttgggatctgccctaataccctcatgttgagcagatcacctcttggaaagcatggttagtctgacacacttctagcctcggccatccctaaagccagggacactcagtggttgtgtgggaaacctacagaattgccaccacctccctgtatactgtctgtctaacgtctgcactgaagtcactggtgacatgtgccttttgtctattccgggactatgagagttcacacaaccccttccatgttgtacagtaacccaaatctgttctttggcttcagtagccaccctcatttggctcagaataaactagtttcttatttcctttaaagcagaggtgttattttatgtcaactggcagtgccgctgctggctctgggccacttccttcacagcagagaattataacttccccaactctgtatagcacaggctgcactatccgagatcaaggagacagtcaaggccaaggccttaactctgggtcaccaccagggcctgctttgggtcactcttcaactctaggaggcccacagacagcaaggctgtgggtgttctgccaaagtggagctcttctactgaacactggtacatcgcgtctcttgttagtttcccctcctgccttcaaactctgaagtgtggaggctcctgttctgttctgggtagtgtaataagaagccaatccagcaaatttcaattagggaagcatggtcccatttctagagataaaagctgaaagaagtccctggggacaccaggcttccccccccccccccagtgtgttctccttccctcaagtctggagcttccagtcccatcaatacaagtggtatgtgtggatgctcgtgtgttaccaggagtctcctcttccaccttctctaaggttcattttgaagttcctttgcgagcgtatgtggctccgcacccgacttaccgtcaggacatcacagtaatcctcactttctctgcaatgctgaagaatgtactccacccctaggaaaatgtctcccagattataatcatccggtgagtgtggctgaggaaattcgccagctttcagattctgaaaaggagaaacatcaccaggttacaaggacctggctcacttgtttagcagagggcacgggactcttaaccacaggatgctcaagctgcataatgaaggctaaggaccatcaaagagtctgagggggtggaatgcagttatcacacagtgaccctcacgtgctgtttttatcaaattatctactcacccccccaacccctctcaaagtcacattcaatatcattgaattggcatatggacacaatcacactctttccccacttgtgtgcctgccattttttcctgttaagggaaacaggctggagagtggctcagtgggtaagaacactgactgctcttctgaaggtccggagttcaaatcccagcaaccacatggtggctcacaaccatcggtaacgagatctgactccctcttctggagtgtctgaagacagctacagtgtacttacatataagccgggcgtggtggcgcacgcctttaatcccagcacttgggaggcagaggcaggtggatttctgagttcgaggccagcctggtctacaaagtgaattccaggacagccagagctacacagagaaaccctgtctcgaaaaaccaaagggtggaaaaaaaaaaagagaaaagcagaaagaactttgctttgacaggggaagaaacgtgtgtatgctataatccactatatatatatatacagaaacaaatccttcattagctgtggcctcttcagacatgctgtagaccttcagtcccctctgctgggctctgttctacccatcttgtgcgggctatagcccaatcctgtctgcagttagaagcaggcgacactgattctactgcatccagcctctcccaacgcacacctcgagtcctgtcctgtctctgcctgaccaccatgcccactctgcacgggtgcctgaccttattttatgccacaatcacaaggcttaactttccagggttaagcctgcatccttggctctttccttctcttttctatcctttgaagcaccatttactaccaattcattccccaaaaggagtattcccatttcttctgctaacaatgggggaagctatttagacaatgtggttccttgtagctatctatcgcaagggaatctgttgataatgcttaccagtttttacttttctgtccaagcatttactactgaggtacacttaaaactgcagacactcttatttgaatttcctgagggcactgagttagtgagagtggtccctgcatagaggaattgtgatgtttagggctagacatacttaatgggtctatgtcatattgcttcatttctgttttttatttgcttgtttttgagatagagaggatttttttttggaccgagtttctctttgtagccctggctgtcctgttaatcactctgtaacaccagggtggacttgaattcagagatctgcttttctctgcctcccaagcattaggactaaaggtgtgtgccaccactgccacccggctgagaaaggggcttcttatgtggcttttgtctggccttaaactaaccaggcagaccaaaggtggctttgaactcacaaagattcgactgcctctgcctcttggatagatgggattaaaggcatgcacagtcacaccaggctagacttcagtgcatttccagaaaacttcaaaatcaaagataaccagatctgtaatgtaattaacaggaactattctggaaggaaggtaagctgtacgagaagaacatatatacatacatatatatttattttaaatatgaggtatacatatttacctcatgaaatgagaaagaaagcacgtcagttgggacatttttattcctgtagatcctattaatgttctgaatagtcttgttgtcaacacagatgatccccaggtcaaatttcttcactcctaagatactcctgactaaatccatcttcctgcgaagtggcactcttctgatggggaccacccgctgcagatttttaatcaccaaactcatttcgggaagaacacccagccctttaaaaaaaaaaaaaaatggttggaaggaacctgtggttaaagttcgagaaaagacccgtaactactagagagtgataagttatgtaaaaacacacacgcgctcacaataaaactttatttgatgggatttatctggtggcaatgctaagggaaatcacctttatttaccctaggaaactaataaacagggtagactgggcacaacgtgcagaataaggcaagtggtttggggcggttgcaatggtgcaggaccaggtgaggatgagtgtgggtgagcaaatggggtcgctgtgggtccagcgtctctcgggcactcaggctggaggatccacgcacgaacgaggggcttccacgccgcacaatgcgggatcgccgtgcacttaccgaatccgaccgtgaagaaggtcgggggtctggcgggccgcctgccggaagatcagcagcagcacaccccagagagcggaagccggatgcggaggaccggaagttggtcctacaaatttgatgtccgtagcgcacacccaagagcccgctccagtggccggtttgttgcggtgcggtgggcccggtagaggctgcacgcagactgtgggcgagcacaagcgctggcgacagtggccgtatctggcggacttgctcctccctccgcggcctccgctgtcccttgtgtctttgccgagttgctgaaggccttcactagtcttcgctcgaaggcgtctgttaacctagcggccggcttccggagtgttaagcatcggggataaaaagctattatttctagaccagggcatcgcaagttcgagttaccgggagaaaaatgagatggtaggaacccaaagcagtaacattttaaattacggtttttgtgtttttatttatttatttatttattttgccttggagatcgcaagaatctgataagtgatgtgttcccgtcttattactgaggttttgtttgtttgtttgtttgcttgttttttccccgagaaggtatcaattgaataaaatgctttgcatttttattttaatcataacggatcaggcttcacctaagcctgctggagcacacctgtggtcccagcagaagggagaccgaggcagaagaaaggaacttaaggttgtgcttgattgtagtaagcttgaggcaagcctgggctaagcgagaccttgtcttttttttttttttttttttttggtttttcgagacagggtttctctgtatagccctggctggcctggaactcactttgtagaccaggctggccttgaactcagaaatctgcctgcctctgcctcccgagtgctgggattaaaggcatgcgccaccaagcccgttttacgagaccttgtctttaatgaaaagaaaaagaaaaaaaaatctttaaacctcccttacaccataatccatttctaataccctgtgtccaaaacctgttgatctgtgagtggtcggcggcccgttgtgcccttgccttttaaataattgtcttagaatttctgtgatttaagagttggagcaaaatatgctgtgatgtcctaacctttttttttttttccaggtcatcctgaggatgaaggagagcttcccctggcaacagataatttaaagaggagagctacttgtgtatagtccatatttattgccttcagataattggcttgaagatgcacccggtgaaccccttcggagggcagcagcccagtgcttttgcggtatcttccagcaccacgggaacatatcagactaaatcaccatttcgatttggccagccttccctttttggacagaacagcacacccagcaagagcctggcgttttcacaagtaccaagctttgcaacaccctctggaggaagccattcttcctccttgccagcatttggactcacccaaacctcaagtgtgggactcttctctagtctcgaatccacaccttctttcgcagctacttcgagttcctctgtgcccggcaatacggcattcagctttaagtcaacctctagtgttggggttttcccaagtggcgctacttttgggccagaaaccggagaagtagcaggttctggctttcggaagacggaattcaagtttaaacctctggaaaatgcagtcttcaaaccgataccggggcctgagtcagagccagaaaaaacccagagccagatttcttctggattttttacattttcccatcccgttggtagcgggtctggaggcctgacccctttttctttcccacaggtgacaaatagttcggtgactagctcaagttttatcttttcgaaaccagttactagtaatactcctgcctttgcctctcctttgtctaaccaaaatgtagaagaagagaagagggtttctacgtcagcgtttggaagctcaaacagtagcttcagtactttccccacagcgtcaccaggatctttgggggagcccttcccagctaacaaaccaagcctccgccaaggatgtgaggaagccatctcccaggtggagccacttcccaccctcatgaagggattaaagaggaaagaggaccaggatcgctccccgaggagacattgccacgaggcagcagaagaccctgatcccctgtccaggggcgaccatcccccagataaacggccagtccgcctcaacagaccccggggaggtactttgtttggccggacaatacaggaggtcttcaaaagcaataaagaggcaggccgcctgggcagcaaggaatccaaggagagtggctttgcggaacctggggaaagtgaccacgcggccgtcccaggagggagtcagtccaccatggtaccttcccgccttccagctgtgactaaagaggaagaagaaagtagagatgagaaagaaggtgagtcctaaacatgtgtgtgccacaaaagtgtgctgccgagctcttgtgaggtcccttgtggtcacttgattttaagtcccacgatcttggcttttatcccgtggtggctccttttgcctggaagtgttgtccctgacagacttacttgtctgctctctaaattccagattctctcaggggaaagtctgtgcgccagagtaagcgaagggaagagtggatctacagcctcgggggcgtgtcttctttagagctcacagccatccagtgcaagaacatccccgactacctcaacgacagagccatcctggagaaacacttcagcaaaatcgctaaagtccagcgggtcttcaccagacgcagcaagaagctcgccgtgattcattttttcgaccacgtgagtactcccgagaacctgctgcctgtcgctttttctgcattgcaaagaatcacacccagggctctgagcaggagatgcaagctccgcccctctgagcctgtgttctcagtcctcaacttggtcacttgaaaaatacattttttaaaaaattatttttaatttttgtgtatcagtgttttgctggcatgtttgtctctgcatcacttgcatgtctgatgcccatagaggtcggaagagggcatcagatcctctagaaccagagtaacagatgattttacaatgggtggaaccatgtgggtgctggaaataaaacgcaggcctccgtctggaattgcagcaagtgctcctgcctgctgcctgtctatctctccagctccaacgtcgtcacttgcaaactcttttcccttttcagccataagtcacttgcttgatagatggtagggaaagcactcacgtagctttccttttctctttaaatagctcattctaggttcagaattagatttgtgtgactgtgtggggtatggatcatgatagagaaggagtttgagaggacgacgagattttaaagggaaggttgataaagaggataatggacatgtgacgtggaaacagaagggagacttgggggtgtaggggtataggtaaatagccagcagaggcccggggcatgatgtaagggaagggaaccaattagagtaaggtataatgatacatgcgtatgaaatgccatatgaaacccattcctaggcatgcttgctaaaattactatttttaaaaatttattttatgtatatgagtacactgttgctgtctgcagacacaccagaagaggctgtcagatcctattacagatgattgtgagtcactatgtggttgctgggatttgaactcaggacctctggaagagcagtcagtgctcttaaccactgagccatctctccagccccctgaaatttttttttttttttttcgagacagggtttctctgtatagccctggctgtcctggaactcactttgtagaccaggctggcctcaaactcagaaatccgcctgcctctgcctcccgagtgctgggattaaaggcatgcgccaccatgcccagctctgaaatgattttttaagaatctcttcttcacttgaggtcgggatgacatagtttgttttcctaacctgggcgtgtgcaggtctgagttctctggagagtatggtgctgcaggggaggaccgagctgtgcctgtggagtctggttcctctgaaaggtctgagagtcactgtagacacatagtactttgtttccctcttgagacagggtttctctgtgtagccctggctgacctggaactcactctgtagaccaggctggccccaaactcagagatctgtttacctctgcctcttcctctgcctccccagttctgggattaaaggtgtgcaccaccaccacctggcttgcataatactttttcaaacttgaattttctgcttttgcttttgtattacttggctaagttcatggttagtctaaacattcaaacaatacagagaagaaaaagtcatgatcctattccctagaaaaaactgttgggtttgtagcattggctatatgatttcaccttgtgtaaatttatatctttgttatttttctaagtattcatacagaaagaggaaactaataagaacttaaaaaggagaatgcatgttctcataactttcatttttgtggtgtgtgtgtgtgtgtgtgtgtgtgtggtataggggcagaggcatatgtctgggggtcagaggacaccttggtggaggtgtgtatgatgtgtgtgtgtgtgtgtgtgtgtgtgtgtgtggtgtaggggcagaggcatatgtctgggagtcagaggacaccttggtggagtgagctctctcattctaccttttttcggggtccgggtattaaccttgggtcagatgcttcactcactgacagggctcgctgttgtttgcccatacgtgttgtgtctggaagggtctgtatgttgcccgtgctctgtcctgcttctgcctcccaggccctgggagagcaggcatgggccaccattcctagcttacagcttctagtctgatttcccgggatagggtcttgctgtgttgcccagactcacttggaagtgcagggcccttacctcagcctttggaggagttcaggataagaggcatgctgcatcctatccaactaattgttgctgttttctgcagtgaataggaagcctgtggttactaaatactacaaagtgtttttgtctgtcttgtttatttgcttactcagctttctctgccttttggggggtggggtggggactgcgtttggctcttgagtcttcaggctagggattgaactgtgggccttgagcatgctaggcacacgctgtcccgccaagctgcatcccagtgctcaccacccacccaaccccgtaggtatgctaggatgtggtgttgctgtgtagctaatggtctatggcttggtgtgttgcccagcttagtcttgaaactgtgagcaatgtcagcttcccaagtgcttgggttgtttgtacatatgccactgtaccttgcttctttatgtatttatcggatagcttttgtccttagtacagatctcagagaacaacgtttttgtgccagaatgtattcagtttgagggattttattgtttatttcttcataataattaaaaatgaatggctttatattcataattatgtacattacagtcacttcctttggacacaaattctctagcctaagctggtctagaacttgaaaacattttgcataaattattatttattcaaaattattaaaataataatgattattccttctgtataagtattttgcctatgtgtatgtctgtgtactccgtgcatgcttggtgcctgtggaggagagaagaggatgttgaatcctagagctgggttacgggcagctgtgagctgccatgtggatgctgggatctgaggctgggtcctctggaagagccaccagtgtcataactgccaagtcatctctccaggccctggcctagaacctttggccttttccttccccttcctgagtggcctgattaaaggtgtgcacagccatgcctggtgatcataacacttctatttccagaatgttctcatcagaccaagcagatattctgtaatcagtaaggcgcgtctccactctctgaccagcctttggttacctctctttttctatcattatgaatttgcctagtctaggtatttcatggatgtggaaccatacaagttgtctttatatgtagctcatttcacttggcatgttctttctatattgttatatggatgagaacttgattcttttcgatgggtgagtactgttctgttgggttgtctacactttgttactattgttacaacactactcttgtgttgttgcaatgggctattgtgaatgcttggtgtattggtatctgtttgcagcgctgactgctgtaattttgtgtgtgtgtgtgtgtgtgtgtgtgtgtgtgtgtgtgtgtattcttggccatagagttgccatattttatgatccacattttaaaaaaatgttatatatggggctagagaaatggctcagtagttaagagcacttgctactcttatagagggctgaggttcagttcccagaacccagatggtgactcgtaaccagctgtaactccagttctagtggatccgggtattacatgtgaactgtgcacctacaaacccacaggcaaaatactcacgtgcaaaatgaaaaataagcaaaatctaaaatgttaatgtgtatgcatctgtgtgtatattttaatgcttgttgttttgggagacagtttcatgtagtccaggctgacttcaaaattgctatgttgctgacggtgaccttaacacacacacacacacacacacacacacacacacacacacactcactctctctctctctctctcttcctcttcttctcctcctcctcctcctcctccactccttccttctcctcctttttctcttcctcttcttcctccttctcctcctcctctcctcctccttctcttcctcctcctgtccctctcctactactccccccactcccacccccacccccgttttcttcacagggtctctctctctctctctctctctctatatatatatatatatatatatatatatatatatatatatatatatagtcctggctgtcttagaactttctttgtagaccatgctggcctcacactcccagagacccacttgcctctgcctcttgagtggtgggatgaaaggcattgggcttccacgctgttgtggatttgttacaccacacctagcctttttttttttctttttttaagttttgtgtgtgtgtgtgtgtgtgtgtgtgagtatccttgaaggggaagggggttggatctcttggagctggaattacaggtggttgtgaggcatctgtctggtagaggagcagagcagcaagttctctttaacgctaagccatctcattaggtcctaaggtttacataatcattttcattctgtgtgtttgcacatgtgcgtgtgtgcatgtataggtgtgtgcatgtaggggcaggggcatcggtgtacctcggtaatcatctggaggtcagagaacaacttttggaggtccattccttccactctgtgagtacaggagattgaaccgtcttgtgtcacggtgccaggttccagctcagccatcttgctggccctccttttatttttgagtagcctgttctgtctttcagcattttaacatagtgtctggtctctctgtgtccttacactttgtgttgtgaactgtttttcaggcatcggcagccctggctaggaagaaggggaaaggtctgcataaggacgtggttatcttttggcacaagaagaaaataagtgagttttccactcttgtgtccccagtctgatgctctctctctctctctctctgtgcagggcctttgacgtgcaggtgtgggttctttccctaagggcagcagcagtgcggctagctccagctgcatcccggatctcatagctgtttcttcgagttttgcaaaccttgttctgacacttgtgtcttcaggtcccagcaagaaactctttcccctgaaggagaagcttggtgagagtgaagccagccagggcatcgaggactccccctttcagcactcgcctctcagcaagcccatcgtgaggcctgcagccggcagcctcctcagcaaaaggtaggactcatctccctagtaactgttgatggaggagaagcaggggagagcttcgatggttgctatggggcaggtgtatgaagagctgcttttgaatctcctccctcacagtgcgtgggtcttcgcagttgccagtgttagcagtgacatggctttattctgaagttccccaggtcctaggtctttgaaaaagccctctttggagtgggactaacttcaagcagatttttttcttttagggaaagccttatcacaaagctgcaatttttgctctagtccttcatttatgttttaaaaaatgtagttggtggtggtgctgtacactctcatcccagcagaggcaagaactctaccaacagactaacatttctcatcccccatctcagtgtctataagatttgaaggatttcagaattactgattgctcactgctcagcctagcctcagatcactcgctcaagcaatcctgtgccagccttgttagggcaacatctcatttatttaggctttgtgctttttattgttttgttttattgggggaggggagttgagacagggtattaggactctgactgtcctaaaactcattatgtagaccaggctggcactgaactcacagagatccacctgcctctgtctttcttgtgctgggatcaataaagtcacgtgtaacaacgcctggctggcttctttagttttaacgctgtattttcttaactttgaggaccagaatgtcttgaaacattaagaagtgggaatgatacgaaggccccaaatgtgctgtcttctccatagctctccagtgaagaagccgagtcttctgaagatgcaccagtttgaggcggatccttttgactctggatctgagggctccgagggccttggttcttgcgtgtcatctcttagcaccctgatagggactgtggcagacacatctgaggagaagtaccgccttctggaccagagagaccgcatcatgcggcaaggtacgacgcacagagacacacattccagattccctggcaggattgtaccaggcagtttctagggagccacagaggctctcctaccgcgaagtcttgggatttctgataatctgttcctggtattactgcgccctggtctgctagagatgtgagctgtgtgtactaatgtgatgactacatatgcttatatgtgtatgggaggatgcaggggaattaactgattattggtagagaggaacaggggtctgaaatgcagaacggagaggggatgctccatttcaggattgttccccttcggaatgttaaactgtgaatgcattgctctcaaagaatgttaaaataatgttacagatacacagaacccatatggaaattcatggactcatttacaatttttaaaaatatttatttatttattggttttttttcaagacagggttctctgtatagctctggctgtcctggaactcgctctgtagaccaggctgacctggaactcagaaatccacctgcctctgcctccctagtgttaggattaaaggtgtgtaccactaccgcctgtctacaattttttttttaaagatttattattatatgtaagtacactgtggctgtcttcttagacataccagaagagggtgtcagatctcattatggatggttgtgagccaacatgtggttgctggggtttgaactcatgaccttcagaagagcagtcagtgctcttaaccactgagccatctctccagtcctcatttacaatttttaaacatttatttttatttcccttgcattggtgttttgcctgcatgtctgtgcgagggtgtcagatcctctggatctggagttacacacagttgtgagccaccatctatgtgctgggaattgaacctgggtctttggaagagcagcttgtactctaacctctaagccacctctccagcccctacacgtttctcttaagtttcagctgtgtggaatgtctttacagctattaagctcatactcgctttgaacttacagtgctcctctctcagcctcctgggattgtacatacctatcacacctgacaggatttgctatttaaagctgtgaattagtgtaccaatcacagagctttcttagcatggtgatgaaaactgtctctatgatttataggcttggtgatttgtacatttctaataaatttgttgtcttaggatttctcttgctgccatgaaacactatgaccaaaaagcaaattggggaggaaagagtttattcagcttacacttccagaccatagtccatcatggaagaagtcagggtaggaactcacacagggcaggatcctggaggcaggagctgacgcagaggccatggacaaatggcgcttattggattgcttccaatggcttgctcattctgcttatggaacccaggaccagcagcccagagctggtacccccactgtgggctgggctcttccttatcagtcactgattgagatgcactaactatagggcctacagatggatcttacggaggcattttattgattgagtttccttctcagatgacttttgtttgtggcaagttggcataagaatctccagtatacttattacaaggaaaacctgactcagtctcacatacctaccaccccagcacctggcccggttgtagcctagtgctctagtggaagcaggacagtctgctgtccacagtgagctccaagatagcctgagctatgttgtggtaccctttcagaaaagcaaaagcaaaaccaaaaaatttaaagacgcttatactaagtttctaaaagtggaactaaaatgtgtatatgctgttttgagaagttttgcttaaaacctttcattctgtgagtaaaaagtggtctgcttactgagggaacaggtgttcccagtaacagtgtacttaggtaacttcattatgcagttctgaacacttaacagaatcccagactgggatatttttacccctccctacctcagggtttctctgtgtactgtagaactggctattgtagaactcgctctgtagaccaggctggccttgaactcacagagatatgcctgcctctgcctcccggaagtgctgagattaaagaaggtgtgcgcgcgccactgtcgtccagcctgcagatgtactttttggttacactcctgcattagtattgtgatttttccaccgaggtcctgagaaccacagagtgctggcagagcacacttgtctaagtgaaagtgatgtaacgcttcgtctgcttttaacattttaaactttctttttattttatgtgtatgagtatcttctctacatttatgtctgtgtaccacttgtatgcccgatgccaacgacggccagatccccttggactggagtcatagacagttgtgagctgccatgtgggtactgggaattatgcctaggttctctagaagagcagctaatattcttaatctctgagctctctctccagttctgtcttccttcttgagtctgtagtgaatgtgtttgattattagagaggggtgtagccttggctaggggcttttgttagccaagatacccattgcctggcagggtgggctacgaggcctatctcagaggcccaaaatttaagaaacatttctttttatgtgtgactgttcaggggcagtgcacagatgagacaggatcttatatattctagactaaccggaactcattatgtggcccaggctggccacacatttaggatccctttgcctcagcctcctgagtgctgggatcacaggctgatttttttcccattttatgaaagtatacttcgtgagttcttttttttttttttttttttttttttttttttaagatttatttattatatgtaagtacactgtagctgtcttcagacactccagaagagggcgtcagatctcgttacggatggttgtgagccaccatgtggttgctgggatttgaactccggaccttcggaagagcagtcgggtgctcttacccactgagccatctcaccagcccccacttcgtgagttcttagtactcctgtggtgcacgcacccttacgtttggcttggtatcattcagctcgagtgaagaggacggacctggacaaagccagggcatttgttgggacgtgccctgacatgtgtcccgagaaggagcggtacttgagggagacccggagccagctgagcgtgtttgaagttgtcccagggactgaccaggtagaactctgtgtgtcctaatgatctctgctttttttcctgttgttttgattttgacttttaaaaatgtatttatttactctacaagtgcaaatgtgtgtgtgtgtgtagtgcatgtgtgccacaaagactagtgtacaagagcagcttctctccttccactgttctgaagactgaattcaggccttgtgtcgtgtgccctcacccacactgagcgatccagctgggctcctattgttttgtttctggctttggattttggagtcagggttcctctacatattcctggctggcctagagctcactgtgtgatccggctggactcaaactcagagatctgtcacctctgcttttgaccgctgggattgaaggtatgtgcaccgacaccaccactcagcaccatttttgcttttaagttgttttctcttcccaagatactaactgttaaatgaatgtgtcgaagggcatggcttcccctcacttgagttagagtgcgtgttctgagttgtttgccaagaatttgcaccagtctgcattcttgtgcccttcagatttgctctacccagggtccccagcccagcaacatgcctcaccatagacccaggactgatccacagagcagccagcagataagcaggggcctcatctctgcacctacccacgtttgttatcttctgtgtctgcgaattcctgggaagttgcacctgctccatcaggcctgacccacagggctctgccctaaccctttctggtctaaactccccacctctggtttatttatggtgtgttggtttaacttgacacttgaacacagatgagatctttcctgttgcctgagcccctttacctgtcacagctgtgctttgggcgggctgatgtgtcttcacttagatttctgttcctctggatgccttgttatatttgcccaactcaagtttcttagcttacattgtccttgaaatgtctcacgtttaacagaacgttttcatctaagagttacattctcaagcattgttctcatagggatgcatgtcttagggttttactgtcttgaagagactctatgaccaaggcaagtcttataagggacaacatttaattggggctggcttacaggttcagaggtgcagtctattatcatcaaggtgggaagcatggcagtgtccaggcaggcatggtgctggaggagctgagagttcttcatcttgagacttctatcttgattagagggcagtaaggagaagactccctctgtaggcagcaaggaggaggctctctcccatactgggtggaccctgagcataggaggcctcagagcccacctaagcagcgacacactcctctatcaagggcatgcctcctccaataatgccacaccctatggccaggccttcaaacctccacaatgtgtgtgtgatttcctcctgcgtcttaaggtccaaaaactgccataaagcagtttgtccctacttcttgcccccaggtggaccatgcagcagccgtgaaggagtacagccggtcctctgcagatcaggaggagcccctgccacatgagctgagaccctcagcagttctcagcaggaccatggactacctggtgacccagatcatggaccaaaaggaaggcagccttcgggattggtatgacttcgtgtggaaccgcacccggggtatacggaaggtaactgctccccactcagatgatggaaatgcgtgtagatttacaaagtgaacttcaaactttttgttttatgtggatatttttatctggaacaaaaatataattttatttgagccattataaaactgtatttcattgtttcgttgtgtttgtttcaagttgaaatgtagttcaactcataatcataattttttttctcaaagttgactctgcatgtatcttgtgtttgtgttttctgtgtgtgtgctcagtgcttgtgtgtgtatgtaattctcccctctaaccttgaacaggacataacacagcagcacctctgtgatcccctgacggtgtctctgatcgagaagtgtacccgatttcacattcactgtgcccactttatgtgtgaggagcctatgtcttcctttgatgccaagatcaacaatgagaacatgaccaagtgtctacagagtctgaaggagatgtaccaggacctgaggaacaagggtgttttttgtgccagtgaagcagagtttcagggctacaatgtcctgcttaatctcaacaaaggagacattttgaggtaggttttcagagtcagaagttgggctttgatgtatagaagtttcgtagtgcagttggcaaattgagtcaggtgtaaacattgggagcaagtactgagacccgtgtgctctgtataatccctccatgttcattcctgagtggaagcctcccagggatgcaggaggaaactaggcacgtaagctgagaagtcccttagagttgttggcagttcagctttcagactgctttgttagaaatactagaaggatgggttaaatgaaatcagagtagatcagttactggagtgaatggatttgaaatgcagacctgacatttcagtagatctataggtgagaaatacagggaaactaacatggaaagcgattcaggaagatgccaaacatcctttggccacctgtgtacatatgtgggtgcacataaatacacacagttatgttttctgttctgctgttttgctaacagctgccaatcagtcggctaaattattccttacttgtttatcatccttttaatttgtcattttatttatttatttattttgtttctttgagacagggcttctctgtgtagccttagctgtccttgaacttattctgtagctcagactgggtttaaaggcacatgccaccatgcccagctgtttattatctttttaagattttcatttagtattgtttttaattgtgtatagtatgtgtctgtgtgtgcacatgtggaaatgaatgcagggtcctgtcagggctggaagagggtgtctggtatcctggagctgaagttgcaggcagctgtgagccacctgacatgggtgctagcagtctaacttggctcctttgcaggagaagcaagtgcttttaacctttgagccatccttccagccccacagcttattatctctttaaagaaacacttttaaaaccacacatgtaaacctattagaagttcaaagccatccttgtgactacagagtgaacttgaatttcacctaggatacagaagattctgtctcaagtgaatggatggatggatggatggctgggtgggtgggtgggtggatgggtggatagatgatagatggacaaatggacggacagatgaacagacggatgaagactgtagagtacctgctgagtgtgaggatggcagctctggttatagagcttagactttagtggtttgtgtcagacttgctgtcacaggactgctgaaacccagttattatcagattgattaagaccagtgtcctgaccctctgccttcctaacttacagagaagtgcagcagttccaccctgacgttaggaactccccagaggtgaacttcgctgtccaggcttttgctgcattgaacagcaataattttgtgagatttttcaaactggttcagtcagcttcttacctgaatgcgtgcctgttacactgttactttaatcaggtgagtagagcccctgctaccaggtaagaacaggaacaacaatactgtagtgttgaagtgcttctctgtcctgcgctcttcccgtgggcagccagccagctgtcaactcatgcgacaggcacagcccagcgaggtgtttctgctttaatcttgtatgatgggataccatggctctccattaggaggggccatgcagtgtaaacatggttctgtgtctcacagaagcctttggagtgacaggtttagttcatgaaagcaaaccccaaaccacaaatcctatattgtacaaaagccttaactttgaagtcattagtattaataacatttttgagagaacagtagcatagaaagactttggaaaaaaacagttttggggggtgagctgtgtttccactctgccctgctgtgccttgggatgacagaggccttcagaagaccgctggctcctctgtggtgagaagtgtgagcagcagccgcagcagcagcagcactctgccttcccatgctgcctcgggtctgcaggtgtctgctagcaggaagaactgggagttattacagcctctgatcacaccaagtcctggaaatgctgaatattagcacagttatagtctaggcaaagaattcatttttaggagttgtattttttttttaactttttagtttttgagattataatacagttacgtcatttatctcctccctgtcctccctctaaactctcccatgttccagtccttactcctttccaaattcatggcttctttcttcataaattggtgtatatgtgtctatgtgtttatgtattagtgcatctgtctgtctgtccacacacacacacacacacacacacacacacacacacacacagacaccttaatataaggataccatgctcagtctggataatgtctgtagattttcggggctgaccacttggtgagctcttccctggggaagactgtttctcccacactcagcatcctttagctgcctgttgttctgtgtgtagggttggggcctcctgggctttcccctgtccgcattagcatgtctgttgctgtccttgttgaactcatgcttagacagtcatgccggtgagtcttcatgaaggtagcttctgactctgacacaatcttatggcaaaccgcctggccctccggcttctacagcctttcctcccgtctcccacacgatccctgagccttaggtgtgggagcggggttggagttgcaccctttggcattgggtccaacaactctgcattttggttggttgtggttttctagaattgtttccagcttgcaaagagacgtttccttgatgagggtgaggacgacacaggacagatatttaataaagtggcagttacaggaagatccataacttcaccagcctggggaggtggctaggtttcctgtatcaggaattgattgccctctgtccgagcaggccttaagtctagttggagagctattggttactaccaggctatgtgtgtcaccaacacacctggaaaggaggttgccactggggagctctgcatctacttctctgtgtcattacagtttatgtgtactctccttgcacacttgcagcgtgacagcggagaaagtcagggcagattctctaactctccagccacaggcctgcccttcacagccccaactctctaagctcctgctttccttgtggtcacttctgtttcctgtctctcaagtctttgcataatccagagaatcttaagtcaagccaaagtcacttgtctgtccattgcccaaatgttttcagtccaaatgacatctggtgttgtacattgtggtgagattttcccaaacttctgtcttctatactgttgccttctcaggcaatgatgtgcctgatgctgtctgccaccctgaagcagatgcttagtcatgaacttcctggtccagagcagtgctgtgtcatattagtggttgtcctcaagcagctaaggagggagagaatagtattactttttaaagtaatagtagtagtagtagtagtagtaatagtagtagtagtatattattggctactgtaggtagcttcaaataagtaaaattgggatttttttttagaattttatatatgcatatttaaagacttatttattttatgtatacaagtacactgtagttgtcttcagacacaccagaagagtgcatcagatcctattacagatggttgtgagccaccatgtggttgctgggatttgaactcaggacctctggaagaatagtcagtgctcttaactgctgagccatctttccagcacaaaccaggatttttttttttttttttttttaaagaagacctttccactggtggtgttctccctggtcctgagtcttaggccccttctccttgctctttcggcccagctctagctgccacagtgccttcctatttccttacttaccagagctcgccctgatctctctcagggctcgtattccctcagactgccttctttgttgtatataattttttaaaagatttatttatttattttatgtatatgagtacaccattgctctcttcagacacaccagaagagggtgtcacatcccattatagatggttgtgagccaccatgtggttgctgggatttgaactcaggaccttgggaagagcagacagagctcttaactactgagccatctctccagtctgtctataatttctattaagtgttctttacatatttaccatcattgctctagtctcttccctggcatgctagtagtgtggacacgggaactttgttggctttgtctgcattgtactctgagcattaagaatacagccaggcatgtatgcactctctctctctctttctctttttaagatttatttatttattatatataagtacattgtagcttcttcagacacaccagaagagggcaccagatctcattacagatggttgtgagccaccatgtgattgctgggatttgaactcaggacctttggaagagcagacagagctcttacccactgagccatctctttagccccttcatatgctctcttgagtgttgttggcaattaatgaccactgggaggaaacagcataagtgctcagaggccctgaaacctaaccagacttccgttaagattttcctgttttctttggttgtcttgttttcgttacactgctatgaatccattttgttttcatacttaatttaatgtcttacatttttttccccttgcattccatagattcccatagtttcattacctcagctacttctggttcaggggatgttggacacttggttttcatgccctttccttggtagatgcatgctagtttttcttacaagtaaaacttcgcataccatcttttcctttggggccgttttcacagtagtctttcctgagcatctgagtgtctgtaagagcgtgcacaggagctaagctgtagcaggggctcatggttgtgtggctggctggctgtggcttttctctgagcttgcattgacttgcttctttcagatccgcaaggatgccctccgggcactcaatgttgcttatactgtaagcacacagcgctctaccgtcttccccctggatggtgtcgtccgcatgctgctgttcagagatagtgaagaggcgacaaacttcctcaattaccatggcctcactgtagctgatgggtaagagctgaggctgtatctatagccttccgacttctctgccccctcccctcttttcctttttccttttctgataaagtctgcttgctgggctcttctgtgtgcagctttcctgctgtgaaactaggggcactcccaacagacaaggggccagaccaagtccattttttgtttaagatagggtctccctgtgtagtcctgcctggcctgaaccttgtgtgtagaccaggctggcctcactcagactcatagagatccacctgtctgtgcctcctaagtggtagaattaaagatgtacatacaagggatttgggaataaaaaaaccagaccaacttctttcttattcccaagtcattgtttttgatcagttagctgagaacctaaagataaagattaagacttttctattttcttcattggagattgactttgttcacccatgtttggcccctgcacacctgatagaggagctgggtagaccagtaggccatggcaaggccttctgttcctgtagtcagggtgagactggtgatactcacaaactgttgtcccaacaaatggcaccattacatttggcatcctctgtttcctcagcccacctgcagctcttccctctcgatctatcctcagggaagtgctgtggctttgaatgagtgggatgccatcattgaaaaaggagccctgggtcacgatttcctgagactggacgctttttcatctgatacctgtccagccttgctttgatcgggggatcgggtagttctgtgtgaggaggcttagccgtcttctttccctgctgactacttgctgtgctctttgtggtctgcgtagctgtgttgagctgaatcggtcggcattcttggaaccggagggattatgcaaggccaggaagtcagtgtttattggccggaagctgacggtgtcagttggggaagttgtgaatggagggccgttgccccctgttcctcgccatacacctgtgtgcagcttcaactcccagaataagtacgttggagagagcctggctacggagctgcccatcagcactcagagagctggtggagacccagcaggtgagtcaagtacgtttcccttcttggaagcctccctgtcactcgaagattctgtcttggccagatgcttaaatatctcttgctttgcctggatctggagttttgaagcccctgttagagcttgtgatagtgcgtttccacacagggcatctgtcatcctgtgccatgtccctgaatggttgtcaggagggcagtctgcccctcacgctacagatagctgtgtccttttctagagactgtagttgtgtgctctgctagcaagtgtcttcagcaccttgtgtctctttctaggtggtggcagaggagaggactgtgaggcagaggtggacgtgccaacattggcggtcctcccacagccgcctcctgcatcctcagccacgccggcgcttcatgtccagccactggccccagccgcagcacccagccttctccaggcctccacgcagcctgaggtgctgcttccaaagcctgcgcctgtgtactctgactcggtagggatcgtgcgtgttaaagcctcatgacgtctgtagcattctgtgtaagggtgctgtgttgcttggtctcgttagataggagcccgagtcgggagggggagggggagaggctggatctactcagtcagcctcaggtaccaacaggggcccatcttcatcatagtcagagctacacttgagtgcctccttccataccaagctgaaccctacatgtctgttctgctcatgtgcagcacccagcaaatggctgtccagggcctgtgggtcacgacactgctttgtacctgtcggcagagggaggctttggttttgagcagatcttgtttgttgcacaagtggggacttgattgtgtctcactggcctctcaggcagatgctggacactgtccctactggagggtcagagggtctagagggaaagttcataggtcacaggaattgaggatttaatgtgcacacaaaatgatggctaaaggtgctgttggggccacctacagggcagtcctcagcaggcttgcttgccctcacctctgtggaaggcatctttctgttgttcagagtcttcctgcagccctctacactaaggtccctgtgctttgctgggaacaccttcacaaatgtcactaagaagtcttcacgcaagatgtctctccttaggacctggtacaggtggtggacgagctcatccaggaggctctgcaagtggactgtgaggaagtcagctccgctggggcagcctacgtagccgcagctctggggtgagtggtgactagcgtgtcagcctttcttgcttggctgacaattgctttctgggcacagtcatgtccttcctaataaagctgttctctcttaccagcaagtccctgttccatgtgcttaagatccacggtgacaatttcagggactttgcacctctctgaggcctaaatgtttcttctggtctctagggaggtgcggtttctcctgtttctgacctttagttcttattagtatgtaatttccatttgtgattccttttttaaacggttcaagtcttaattatttgattgtttattttatgtgttgaagggtttagcttgcaggtatgtgtgtcctccatgtatacccagtacctgcagagggcagaggaaggcatcagctcccctggagctgaagttacagatggttgtgaggtgtcctgtgggtactgagaatcgaactcaggtcctcaggaatactcagtgctcctaactgctgagccgtctctccagtactgcccttttgttttagcttttgaactggacactgtagaccgtgctggcctccagctccctgagatcagcctgcttctgctccccctctgctggggctgaagctatacttcaccatgccagcctgtagccttgaactcctgactgccgcccctagcctcctgagcaccaggattgcaggcgtgcactgccagtctgtccgtccgtctgggagtggtggctctctgtctcccgttctttgtgacaggagtggcatctcattaaagcctgacttgtatgtccctcatggctggcggtgctgcttcttttctgtcctgtttgttcttctgttttcctggaactgtaagttaacttgttggcctctgcttgagctatttgtggtcgacttgtaggagcgtctttatattctggatgttaatctcttatcagacacagaagtgcatgtattttctctcattctctggatggtctttttcccctgtttcagcccccacctctcaagtacacctggcaggcagcgctgaggtgtgagcctttgggcctgttagacaagcactctacaaccgagccaccgccctggctctgaccccgcttctcttctcgcctcttgtaacgtctctaatgcatacaagagtcaaacctttttggagtctaatctttctaatgtttcttttgttacctgggcctttagggtcttacctagaaaattactgccaaatccaatgtcatgaaaatattcgtattttcttctacaagttttatagcttatgtttttttctttgctttgtctgtctgtttgtttgtgcatttgtttggacggtgtctcagtttggggccctggcttacctgaactcagtgtgtaaaccagactgtcccggggatgctcaaatgaccaacagggcctggagttgtagtgcaaactgtttctgtccttagtttaacgtactagggattctctcattcctgaatctaagcaatataccttgtgaaactagtttaccatttcatttacaaaaataagattatttatgataagagatatgataaactcacttatatattttttaacttagtttttaaacttgattactcttgaactcctttgtgaattatatcttttgagctatataattgcaaaagtcacagaatcatcatgtatatgtgtatgtgtgcatgtgtgtgtatatatgtgtgtgtgtgtgtatatatatatatatatatatgcgtatatattactatatatgtgtacagtattagtattaagacgattgcagctttgtgaggtagtaagtatagttgtatttctttactgtagatgcttttttagaagaactttattttgtttattattagttattactattgttcaggttacctgctagcacagcatggcagctttacggctgagccatcttgtccgcctgtgattggttttcatgtattgaggtctctgccttctagagacaagtctcccatggcaggagggaatggtggcttgctgttgtctgggtttgaatgccgcctgctttgttttgttaagcgtttccaatgctgctgtggaggatctgattactgctgcgaccacgggcattctgaggcacgttgccgctgaggaagtttccatggaaaggcagagactagaggaagagaagcaacgagctgaggaggaacggtgggtgtgtcttgctcctatagacgggcatggaggttagtttgccccagccctgacctctgacttctgatagcccttctgtcgtctgaccctgttggaccattcaccaccctaatgatttgactaagggaagggtgtgtgtgtgtgtgtgtgtgtgtgtgtgtgtgtgtgtgtatttgtatgtatgtatgtgtgtgtgtgtgtgtggtatgtggtgtatgtgtgtatctgtgcctgtgtgtgttgcagggtggatggcatattgatgtgtgtgcaggttcctctgggtgttaggtctctggagctgtagctacaggcaattatgagcagtgccatgtgggacctgaacctgcaaaaacactgcgttcttaaccactgaaccactgaactgaattctttaagtattatctttgtgcttttcttccgtttacccctaggttgaagcaagagagagaactgatgttaactcagctgagcgagggtctggccgcagagctgacagaactcacggtgacagagtgtgtgtgggaaacctgctctcaggagctacagtgagtgacatactgtgtcctgaatgtcaggaggaaggagggactgtggccaagctgttgtaatgatgtgtatgcatatcatggtctctctttctagccccggctgtcctgtagacaggctggtcttggcctcagacacagagagctccatctgcctagcttcccaagtactgcatcaaaagcttctagacagatgtagcatgctgttttctgatagggaggccctctgagtcagtgtccctatcaggaagcatgagatgtgtctgttggcagatttactagagaacctttgtatagtaggccatatgccattattcttcaactaagggagcctttctttcttttctttttttttcctttccctttccccatcttgctctggtccccgagagcagggatagggattgtttgtttgtttgtttgtttgtttctctctcattacggatggttgtgagccatcatgtggttgctgggatttgaactcttgacttccaggagagccctcagccctcttaaccactgagccatctcaccagccctaaggaagcctttctaaacttgtgtgtgaggcttccttggccttttcacttgagagctgttgaggaaggtctgccctgtgcttctgtcctgctgagagcattagctggacggagcacagtgcacggcacagcgcccaccgctcagaggcagtgtgtttgcagtccgtgttcttcctagtccgagacttgggagcctgtctctccagttgctataaggaagagatctcacaaaacgatgtcaaatgtccattctctgaggcaggatcatactttgtagcccagaatggcctagcacttactatgtagttcatgttggtcttgaacttgggttattctcctatgtgagccttccatgtactagattaatttagtatatcatttgttttgttttgttttgttttgttttgttttgttttctgagacaaggtctgactatgtagtcctggctggtcttgaactcactttgttacctgggtagtctcaaactcagagaaagccacttactgcctctgccttccaactgctgtaattggaggtgtgccactgtgtcaagctagtgagcttatttttatttttttaaaggagagggaagtttatgcctgtttcttttcaaatatttatgtgcatgagtacacagttgctgtcttcggacacaacaaaagagggcattggatcccattacagatggttgtgagccaccatatcgttgctgggacctgaactcagtaccttttggaagagcagtcagtgctcttaaccgctgagccatctctccagccctgtgaatttatttttagtcctaaataaaagcccagggcttgctaacgtgtgaggtaagtgcctgcggctctgggtgtctgagtctggctcggtctggagtgtctctggcactggcaaagatgggttattgggaaggggtctcctctgcttagggttacttctgctttaatggggtaggttgtttttttttttttttttttctgccttatttagtagaatccttttatttaaaagtttctttttttgggtgagagaaatacctcagtggttaagagtgcttgctaaacccagaggtcctgagtttaattcctagacctacgtcagttactcacagtcatgagtaaccccacctcccgggactctgctgtcctgatccagcctctgcaggctgccaaacacaggtggcatgccacaacactgtttctctttgtatctgggtacagcagtacttgcctgtcgtcccagtacttgtgaggctgagggaggagaacaggttttaggccacctcaggctacaaagcaaattctgtgtcagctggggttaactagtgagactctctttgaaaaagaggaaagtctgagatacaggtttacctgagggcaaccaccatctgaccagaggaagccattcctagtagccactagtatttatcatgtgtggaaggtacttctaattgtagataccacatattgctgataagactttgaagttgtctaagttgtcattaaaaataaaaattcagaatcacttgttgccgagcttaatgacctggagccagtctgcagaacccactcagtggagtaagagagcacttcctgcagcctccacgcacgtgtacccatggtgcactggggccctcacaccggacagagtaaagtttgtgtgtggcttcttgttatgttaggttcagctgctgtgctcaagtggtgctctcacctcaggctcctgggcgttagggttaggaagtttacgcaggccaccatagctttatgagttaaaactttatttctggattgttacagtggcctgtttggacttgatctggcacccccatgacatttttcgcttttcttcccaggtgatctgcttttaagtaaaaataaaagtcttgaactccctcttatagtggaaatgttatatttgttactgtatttccataggaagtcagactccagcttcttctagggtgggtgcagcagtcagaaccagggccttacacatgctaggcagatactgtcctaatttggttttcattgctgtgactaagactgtgactgaaagcagcttggacagggaagagtttattttttatttggcttacactgccacatcacagctcattatggaaggaagttgaaactgccttacggacttgcctattggcaattggatggaggcattttctcaattgaggtttctctttccgtataactctagctgtgccaagctgacattcccgacccagacgcacatttttaaagcaggcccgtaagtgtccatgccctttggtgtagctgcttctatggtaattgctctctattttaggagtgcagtagaaatagaccagaaggtccgtgtggcccgctgttgtgaagccgtctgtgcacacctggtggatttgtttcttgctgaggaaattttccagactgcaaaagagacactccaggaactccagtgtttctgcaagtatctacaacggttagtgctgtgttcctacagataacgtccacccacacaggagcttttatcgcgttcataatatgtgagctgtcaactccattagtcagacatgaaaggctcacagattgataggaatggagaactgaagtagagttagaatatcttgtatgtgaacagatatttatagagtacttgctttttattgtttgtttgtttattggctgtactggatacagggaaatgtctttgaatacattaaataattcgccatggcttcacgaatatgaatgaatctttcaaactggtattctcttacaaaaatctgatgttctctctaaaatcaaaaaatcaaaaccatgtatttttttagatttatttatttatttatttatttatttattttggttttttgagacagggtttctctgtatagccctggctgtcctagaactcactttgtaaaccaggctggcctcgaactcagaaatctgcctgcctctgcctcccgagtgctgggattaaaggcgtgtgccaccacgcccagctttagatttattttattatcttttttgtatatagtgctttgtcttcatgtacgtatgtatgtgaaccacacgcatgcctggagaccaaggatgtcagaagaggtgtcacatcctttggcactagagtcatagacagatgtgacctgccacagtgctaggaatcgaacctgggtcctctgcaagaacaacacgtactcttagccacagcactaactctccagctcctaatggcgatgctttttatgatggtgtttccccgtagtgactcattgtgaactacaaatgcatttactacccctgaccttcccagtaccatagctcagcaacagaacgcactcagcagtgtcgggtgactgccttccgggctgactgggcggtagctaggtgtagaggggtctctcatgatattgagagtattgtgtagcatatcacaagtctaggacaaactttcttgaatgtgggttctgtaactgactgtgagggttgcagagagatataataatgacaacagtaagaggctctgaacgtgcagtgaccaaggtcggttcacagtccaatgtgtaatgactgacacatcactgcagctggagacacagctgtggattctccgctgctgtgcccccatatgagtgaacattgtctgtgactcaagactggtctttcttgattttttttttaaagatttacttattattttatgtgtgccatgtgcatgcaatgcacagatagtgtagaaaaggtcagaggaaggctctcatctcctaaaacccaagtcacagactgtgggagctgccgtgtgggtgctgggaactaaaccctggtcctctggaagaacagccagtgctcttaactgctgagccatctctccagcccatgaaaaagctccagagacataatattttagtatcattatccctcagcagctatcaaattggtataattttgggttacattgtattagacaaaacaagcatatttgtgtccttagtatgcaaatttatattaatattcaatatatgataggattatatatatattccaaattgttgttttaagtaattctctttataatttattatcactaaatgtttgatttctatattttatatacctatataccaggggttttatacaaattttttgggtgaaaaaggaattgtaaattgaaaaagtttaagaaatcttaagctaggaaattaaattttaagtccatttttaaaaaatgaattcatatcactttggtgatgtcataaagttaaaaaaaaaagttcaggtattaagtttgagtttctctctccatagtagaaaatgatcagtttatgaagaaacatatacaaacagtatatatctaaactaaacagtgtagcccatttcaggttgggtaatggtgagcgtagtccaagcatggtgggggcacagagatgcctgtgtatcgctgtggcctctcagcagtaaggggcacccagtgtgtgctacttaggctcaccgctcatgttgtatgtgtgccaagggtgatccattttatactgaaatttaaagcaagtgataatggccttgatggtaacaacagtatcaaaaggaacacacccaggagaaaacttcctaggacagaccgccgtccttcagaagtagcagctgctggtacccttcaagaaactgtacccaataaaaggtgcaggcctgacctttgtagcatggtgtcaggttctcctgttactattataacagtgttgcagtatgctcttgggagtgtctgtgccttaagtgactgaccctctagtgactgtcacatggctctctgtggctgtggcagtgccttagcgacctctcttttattaacattttacatgtctgttcacacatgttgttgggacctacattcctggttgctggtctgagggatcactatactattaagtttgtgtccagattgcttttcagaggtaattcagtgtttgtacttacgtccagcagctcagagctcaccacttttgtttttcatcacacccacattttaattgagattaattttcattttaagcactcttgctgaagaaaaaaacttaagattgtcaaagccacacttttagactggagagatggcttagtggttaagaatatttgctgctcctgcagaagacctgtgttcggttcctagcacccgcttagtggctcacagaagttatgtacaaggtggacatacatgtacacaggcaaaacagtcacatacatgaaaataaaataaataaatctaaaaaaaatgataaacaaaaccaaatttccatatttatatactgaactatgtttttcgccagtggatgagccttaaacacatcatccaataaccgcatgctgttttgtcctctaggtggagggaggctgttgcagctcggaagaaattccggcgtcagatgcgggccttccctgcagcgccatgctgtgtggatgtgaatgaccggctgcaggcactagtgcccagcgcagagtgccccattactgaggagaacctggccaagggtcttttggacctgggccacgcaggcaaagtaggcgtctcctgtaccaggtcagtcccagtggcgtggcctcagggctccatgcccagctagttttagcttgagttagactgatgactttgcagctaaagatggatggagcctgaaagtgaggactgacacaggaatgcatcttgaaggctgtgtttcccacagttctgagcctgtgacttctctaccactaggaagggaggctctcgttctgcatgaccttgaaaggcttaggttctgtgggtagcctgccccagctctgcttccagacactgtcctactgtgctcctttcactgtgctccatccacctccatctcctctggcagagtcccttctttctgtgtcacccccatccaggccctcgttgctgttcctcctagtttccccattcaatgcagttcctgaggcccaaactgtccagtcatagcatctctggcttggtgtttctccgtaggcacagtgccagtgctgtcagtttgtttgtttgtttgtacagggggctttcacagctgtcctgcctcccagcgggcaggccttagggggcactatggaggtgtcgtaggcttaacctgatggggttatgtctcttcctctggtcatcacaggagattctcactgagcaattactcctaaggttttgtctggtcagttagatcaccaggtcatctttgtataactagagattatagtcaggcctatactctgaagtcagggattaggggccttactctgacccatgactgttgtgacacagtctggcttcctgaagtcatagttaactttggttttgtttgtttgtttgtttggttggttgttttattccgagacagggtttctccgtgtagccttggctgcctggctagccttcaactccgagatcacctgcctctgcctttcaagtgctgggaatcaaaggtgtgcgtcaccatgcctggtatgtaggcatgttctgtgagccacaccagccagcacagaggctcttctctcccatgagagcgtgctctaggatggcagggattttgtctgtttctcatagccagctcacagtgaatagtgcagcagatatttgatggggttgggtgacccgttattttatcagagtctattattctcccccaggaaacattgagcaattacttttcactcagaaatatcaataaatactatttattacttatttttaaatttttcatacagtatattttgattgtgttttttcctctcccctaacttctcctagattctttctctctcttaagaacaaaagataacaataacaaaacaaacccgtgaggtctgtttgtattggtcagctactgctgagcatgagacgtgaggtctgtagtccatttctggtactggggaagtaaatactactcgtttcttcccttttgtagtccttgtctttctttttttgttatttgtaggttgaggcggcttagaaacaagacagctcaccagataaaggtccagcacttccaccagcagctgctgaggtctgtccgtcattctcactgtttgagttgttcctgcttgggtactgcatattggctcatggtgatctgccccttccaggaatgctgcatgggcacctctggacctgccatccattgtgtctgagcacctccccatgaagcagaagcgaaggttttggaaactggtgctggtgttgcctgatgtggaagagcagactccagagagtcctggcaggtcagcagtttcctgtatggggagtgtggatactgatccggaggaggattgtgctattgagagtcgcaggcaggcaggcagaatgtttgtgggggtggacactaaaggtttgtgtctcagtgtactttgctcatatgtatttggatttttatcatttttccatgtactaggcattattccatgtaagtccaaaagctctaagattgaggattatttaaacctctgtatggtatggtgtcctgattagtatctacattatttaagattctgtatatttgtgcaccttgtgcttgcagtgcctaaggaggctagaagaaggcatcagattgtctggagctagagttagctgccatgtgtttgctgggagttaaacccaggatctttgtaagagcatccagtgctctttactgctgagccatcatctttctagccctgaggaatatttgtttgtttgttttgcatgtgccacagggtatgggggtcaaaggacagacttacagaaatctgctctcaaacttcctagtgctgtgactttagtacagctactcacactgtggtgaccttcaaccataaaactttcattgctacttcataactgtcattttgctgtggttaggaatcataaatatctgtgttttccaatggtcttaaggacccctgtgaaaggattgttcagtccccctaaaggggttgcagcccacaggttgagaacccccctgccttacaccatctgcattctaggggcagaactcagttggcaggtgtggccgcaagtgtcttttatctactgagctgtctcactggcccaggatcagaagtttgattctgtaaaatagttcggtggtggtggtggtggttgttttttgagacaaggtctcactcactatgtaccctgactggcctggaacttgctatgtagatcatgctggccccaaacacagagatccagctgcctctgcctcccaattgctggcattaaaggtgtgcgccaactcaccttactgaaatgggtatgtgtaactccagggatggtttctattgctcgggccctttcctcttcagctcacagttttcaatctcgttcgaatgagccaatttcacaactgtcctttgcacttacccaagtaaataacccagtagagggccaacctccattttaaaatgataacctgttttgtgagcttcacaattagatttggtgtctgggaccctgtatccatatggtatttctcttgttttcctgaggatttctgtaagtcattttaaaattagacattccctgaaatgttactttctttcatctacagaatactagaaaactggctaaaggtcaaattcacaggagatgacagcatggtgggtgacataggagataatgctggtgatatccagaccctctcagtctttaatacacttagtagtaaaggggatcaaacagtttctgtcaacgtgtgtataaaggtgagtgacagtcacttcatgtacatatctctaggtttcattttctctcctcagatgtctctgaaattataaattactatttattctcaaaggtggttttcaatgactctgagatgatcgaagtaaatgccattgtctgtttttctttacatcttgattaatataccacagccatctacttggtgtaaggttttagtacagattctgggagagcaatgtacttgccctctgtcgtggttacaaataataatatataatattatccagatataatccatttttttaagaggggaagcttactttcgctcatagtattgaaggtttcagtccatgactgatgcccttgttgcttttctgaggacgcacatagcagaagaaaagtgtacacttgacagccaggacacagctgaggaggttggcagcccacagtccttcaaagtcatgtccccagtgacctcatatctccacagatcccacctcttcagtatccctcccatctcccagtcatgccaagctggaggccaagcagtaaacacttggctcctcagggccagactacagcaagcactgagccttggctgccacattcctccttgagaatgtgatgcactctacaggattcctttctactttatcttttgcttgactcaagctgcagcctctacccaacagcagaccttaggcccctttttgttttattgcgagcactaatccctgttaatgtcattctcatagctctttgattttgtcaggtttcttagtccttatttcttttaaacacaatattcctactaattaaagttcccaacacggtgtatttcctttgctagggctctgcttagtaggcccttgggtttgaagtaaatttgtgcatatggtcttggaacaatggctagtacttgtgtgatgttggtgttggtgatagtaacaataccttttcttggtttagtcctttagatgattctgaggaaaggacatggaggggggaatttttctgattgctatcctcctgaaaatatatttaccttatattctctctctctctgctttttcttgttttggcttggtttggttctgtttggtttggtttggtttggtttggttgggcttctctgtgtagccctcactactcactgtcctggaacttgcaccgtagactaggctgcccttgaattcagagatccatctgagtgctgggactaatggcctgtgccgccgccatgcgtggcccagctttgtctttgaaggactgtccagggcacagtgaatagagctctgcaactgtccttgctgaggcagactgtctcctgtgttgtcctctggtacattcaccctgacatctttgattttgttgcaggtggctcatggcacccttagtgacagtgcccttgatgctgtggagacccagaaggacctgttgggaaccagtgggctcatgctgctgcttcccccgaaagtgaagagtgaggaggtggcagaggaggaactgtcctggctgtcggctttactgcagctcaagcagcttctgcaggccaagcccttccagcctgccctgccgctggtggtcctcgtgcccagctccagaggggactccgcggggagggcagtagaggacggtgtgtgaaggaagccccgttcctgatcccatacctttaagaagtgggtggggcatgagtgtgatggatggccagcagagcagtgtggggagctttggggttagtgccctatttgttctgtccacagcgcagggccacaactagcttgggatgtgtcgcatgtgcaaaatgagtattattacatgggtccttcctgtttctcttaaaggtctgatgttacaggatttggtttcagccaagctgatttccgattacattgttgttgagattcctgactctgttaatgatttacaaggcacagtgaaggtatggtttcaccttttaaaggtctgtcagggtacttgttggtttctctcctgagctacctatcttctcatctgtctggaatgtaatatatgtggttgtttggattttgagacactgtcatgtagggcaggctgatctcaagtttgctaggcagtcagggtaacctagaagtgatgcttcctcttcctcttctgtgagtataggcatgtaccgtcctgtccagcttatattagtgatctccattttaatcttatgttttacacacacacacacacacacacacactatttctaaagatacagcaggcaggaataaaaataaaatttaaaaaacacccatagtatggtttcagtaatatgttaaataagttttttggctttgctttgttttttttttctttctttttttttttgtttttttgttttttgttttttgttttttgttttttgttttgttttttcgagacagggtttctctgtgtagccctggctgtcctggaactcactcggtagaccaggctggcctcgaactcagaaatccacctgcctctgcctcctgagtgctgggattaaaggcgtgcaccaccacgcccagccttggttttgcttttatgaaattaaaatgaccatttatatattacatctgaatgtcagatttatctaattaattttttagaatgaatgcttttacaaaatataaagaagtgatattacctgagacttcctggaaaggttctgctaaaaatggtttaggaaaagaagtgtagggattgcatatggcctgaggatgtagctcaggggtacagtcccacttgacatataagaatgtcctaggttcaaaagatggcctagtcagctatcactggaaaaagaggcccattagacatgcaaactgtatatgccccagtacaggggaacagcagggccaaaaaaaatgggaatgagtgggtagggaagtgtggggggagggtatgggggatcctctgcgctggccaatcgatgctggcgtaatcctgcacatagagttcctaaagggcagggcagacctgagtgcctagcattagcagcagacacagaagctagactaaccctagccaggagtgctctcaagttgcctaggtcccacgccagtgcaaaccctgttcccaaagcccgtttcagggctatgtcccaagaacagtcactgcaggcacaggctagggctgcagcttctgaacgctccaggtcccactgcacaacggcagatgcccttcccacgannnnnnnnnnnnnnnnnnnnccattagacatgcaaactgtatatgccccagtacaggggaacagcagggccaaaaaaaatgggaatgagtgggtagggaagtgtggggggagggtatgggggacttttgggatagcattggaaatgtaattgagggaaatatataataaaaaaataatataataataaaagatataataaaattctcaataaaaggctttcttagttaaaaaaaaaaaaaaaaaaaaaaaaaaaaaaaaaaaagaatgtcctaggttttatctccagcactctatgaaaaccaaaccaaagctggacaggaagaggtaatggcagagcgtgaggaagctgcctggcgttcagtgacgaccctagttctaggaataagatggagtggctctgctcctgtgggtggtgaggaagccctcatgaggtccttggtccttccaggagggctctgcaggccccacttactaattagataagactcatggggccctctgtggtgcctctgggaggcacatccacaaggctctagaagcccagactcaggcacgcagaggccttgtgccctttcctgcagcggctgagattttgttgttggggcattttcctaaaacagccatgggcagagtgctaagcccctttcgaaaactactttttaaaacgagtgtgacttgtttgagcagatctctcccaattgtcttgaccctcaggtttctggagcagtccagtggctgatctcccgatgtcctcaagccctagacctttgctgccagacccttgttcagtatgttgaggatgggatcagccgcgagttcagccgtcggtttttccacgacaggagagagaggcgcctggctagcctgccctcccaggagcctagcaccattattgagttgttcaacagtgtgctgcagttcctggcctctgtggtatcctctgagcagctgtgtgacatctcctggcctgtcatggaatttgccgaagtgggaggcagccagctgcttcctcacctgcactggaactcaccagagcatctagcgtggctgaaacaagctgtgcttgggttccagcttccacagatggaccttccacccccagggggtatgtacccaccctgagggaggagtggagggctagcctcctcttcttgctacagagacactataccagcgggtggattccagggtgaagtctgcagtccacttcctctgtgtacctatctgcatcagcctttgggtttctgggttaggatgaaacaggattttatggagtgggagctgttgtccttttccccaggacagtcctgagactgccccacaggcgctgcttaccagaagagctaggccagctgaaaagcatgagacttctgtgcctgcctctgagctgctggccctgctgctatgacagcatttaagtgctagtgtaggtcactgttcatttaaagcctgactgtgcctgtgcctgggggatgaggcctctgggctgtttgatacagactccacagatagccaaggctgactcaaacctggtgctgcaggggctgctctttcctatgttaatggcactgggaaggagggagcctgcttaatattcagctaacaaagcttgtggacttacccactgtagccctctaccaagaaaacagcattaataatatttcgtgttcactgattcttggtcacacctgtaactctctctgcagccccctggctccctgtgtgttccatggtcattcagtacacctcccagattcccagctcaagccagacacagcctgtcctccagtcccaggtggagaacctgctgtgcagaacataccagaagtggaagaacaagagcctctctccaggccaggagttggggccttctgttgccgagatcccgtgggatgacatcatcaccttatgcatcaatcataagctgagggactggacaccccccaggctccctgtcacattaggtagtagtcattcagggtttggggactgaaagtcatgagactttcctaggctaattttacccaaaaaggggggggggagtgagattttagttagttagctagttagttagtttgtttattttaaatagggtcttattgtgtagctctggcaagccaaacaaacaaaaccatctccactcttgttttaaattagaccagaaaagtcttagaaacttttgaagcactaaggtttgactgggcatggtggtctatatctttaattccaacacgcaggaggatctcttgtgaatttgaggccagcctgatttacctagcaagttacaggatagccaggactatatagagagaccctgtttcaaaaacacaaacaaggccagatatgctgtgcatgcctttattccctgcactaaggatgcagaggcaaacagatctccaagtttgaggccagcatggtcagtctatagagcatgttccaggacagtcagggctacacagagaaaccctgtctccaaacaaacaaacaaaccaacaagaaaaggccctaggagagcacagacttccttccctggaacaggcctcctaggttagctcttagaggcacagctctgcgagctattcctgtcccttcacaatcttcaccaatgcatgtcccatccaagcacggaagttacattagcgaatatcaagtggtcatctgttgctccttatatatctgatttctaaaaatctgttcttgtactgttttctcagaggcgctgagtgaagatggtcaaatatgtgtgtattttttcaaaaaccttttaagaaaataccacgttcccttgtcatgggaacaggccagaatgcagacgcagcgggaactgcagctgagtcatggacggtgaggcctatgttgagtgtgttttctgtctctgttctggaccacagccccttccctgtcctagagcaactctggcaaccctgcagagtgcggggtgtccccaccgcgtagacacttgagagcagatgcaggcatctctctccatttatccgatgagctcaggccaaccctaattgcaggaggcagataaaaaagctggtatctcatctcataaacccagttcataaatacccaatgcagcacctgtgcacattccccagtagtcttccttccagaagaaacaggatcagcaagagaactctattaatataatttgctgttgcaatagaaaagccaggtggtcatttcaatacgtgttgaaataatttaaaatgtttatttatttcatatatatagttgttttgcctacatatatgtcagtgccccacttgtgggccaccgttgtattccctagacctggagttactgacagttgtgagccaacgtgcaggcaccggggagagggttctctggaaggccagcagccagtgccatcaacagctgactcagctctacagccccaaaatgaactttttaaagcttaagtcagggtcagatggatggatcaacatgttgggataaaggatggctcagcgggtgggagtacttactgttctggcctggcaacctgagtttgatccctgggatccactgagttggaaggaactgactccacagaactgctctctgacctctacatgtgcacttcccacggccctgagctactgtcttagtttcgtttctaagttttgctgtattggtaaaatactctgacaaaaagaaacccagtggaaagggtttgagtttctcactgggaaaatcagagcaggaacctgaagcagttagttgcagtccagagcgaataaagaatgtgcgcaggcttgctcacctcagtagagaatggcggccacatagggtggtttgagtcttcccacgactactgatgtcattaagacagtcctccacaggcatgtctgcagaccaagttcatctgacagtccctcaatgtgccttccttcccagagaattctgcatgctttcagactgaccactaaaactagccaccacagctacctatcataaatctattaaaacaaaaatgcaaaacacaccccagtaaaataaaagcaacaacaacaacaaagcatcatgctcttccataaagcattaggcttgaaggccagcaccagtctgtgctgcccgggttgtcactgatgttgcctgatggccactgatacggggcagataggcataaatatcaaaaatgagaatttccacacggtatagtgccagctcagaagaatcagcattgtagccctggttacggtccagggttcagcaagctaactatcagaagttcccacagccttgaaatatagaatcagtggataagaacactcgctcttttagaggacccaggtttgattcccagcacccatgtggtggctcacaaccactcatgactccagttccaaggatctggcaatcacttctgaactctttgggcacaaggcacacatgtaatacacatacacatatacaggccaaacactaacatgtaaaataaatctttaaaacaacaacaataaagatgtacttagtatatagagcttaagagatggctcaggagttaagaacatttgttgttcttccatttttagggatttgatgccctcttctggcttccatgtgctcgtgtattcttgtgctacacataagttcatcacaggcaaacattgtatgcataaaataaatcttaacatacacacatgagagacagagacagactgggataagaaacaaaggcctgatttaaagcagctctagtggaacgtttggaagcaatagctgtctttgtgtctgtctgtctgtctccctttttccctccctccccccaaccccctcttcctttctccctccctctcttttatgttatgtatccctggctggcctggaactcactatgtaggtcaggttgtctttgaactcacagaagtctgtctgtctctgcctctgcttccagaatgttgggattaaaggcacatgccagcaagcctgaccaacagtgtctcttgttttgtttgtttgttttttttttgttttgtttttggtttttcgagacagagtttctctgtatagacctggctgtcctggaactcactttgtagaccaggctggcctcgaactcagaaatccacctgcctctgcctctggagtgctgggattaaaggcgtgcgccatcacgcccggctatttttctgtttgttttgttttgttttgccaacagtgtctcttgatgtgtgtgtgtgagtcactatatagcacatagtatgagagctgccctctcttgttgccatagtctctgacttgagggaaatcgaggcaggcccagggcctgacatgggtataatccacccactagagcacttggatcttgaggcttttgttcatagagtgaagacgtgtccagctgtgtctatgtgctgtgcacaatgttgtcatcttctctcccatctttcttgactgtaagaactttcacccttgtgcttccagttcggggatgaggtccatccatcctcctacaagcacttttcctactccattgcttcatgtacaccagaaagggaagaaaaaggaagagagtggccgagaggggagcctcagtacagaggacctgctgcggggggcttctgcagaagagctcctggcacagagtctgtccagcagtctgctggaagagaaggaagagaacaagaggttggtctgtctgtccccttcctgggtactcatgcattctttctacttcctgcaagaggaaagtcaggacagccaaggctaggaaggggcggctgggctggcaagggttatagtgatgagactttatttaaaaagaaaatgaggaagaagagagaaaagaaaagaaaggaagtgagacatttataaagtgtaagtgtgggctggagtgcttgctcattttccagaggacctcactttggtacccacatccatagcaggtggctcctaaacacctctaactctagctccacggatctgacccctctggcctctgtgagcacttgtgcacctacacagatgttcacacacacacacacctacacataactaaaaataactttttaaaagtagaagcccttaagagacagattgtgctctagaaagaatattctaagttttttcatttgaaattggcttcattgcttattttaagtcttctagaggagggaatatgtgtagctaagtctacatagcttggtctgccatggctgaccactgcttcttggcccttgggaagcccaaggcttcagtgggtcatttcttactaggtgggtaggagctagtgcagaccttcctctgcttagctgactccctttcctttgtacctccctcttctggccattcacactgagaaatagaacggggaagacagaacttggtcaaggttgtcttcccaccatgctggtgtgtctctcctgatgctagagaggagcattgcattgtgtgcttgaggtcagctctccccctggggtgcagtgtcacctccagcctacacacagtgctccacccttagggctcacctgagaccttgcttcttcctccattaggacatggaggtcagcacacaaaccgcagccatactgacacatgctcctgacgcagctcctttgtctccagttgccactctggccctctgcatcctgcatgcttgagtctgctcacgagttcttgtccctgtcagtgaccaacaacttcttaaccttgttctgagtccctgaaaggatttaataaatccaagagcaccacagagcgttctctgacgtcatgtgggcatccacatctgttcacggatactcaggacgaggagttaacagcacgggagcgagtgccgcttaagctctgtcttcctcactttccgatctcatactgtctcaggtttgaagatcaacttcagcagtggttatcgcaagactcacaggcattcacagagtcaactcggcttcctctctacctccctcagacgctagtgtcctttcctgattctatcaaaactcagaccatggtgaaaacatctacaagtcctcaggtgagaacgagtacccttgccatttccagaattaaagacggggaatacgcctgcctcagtggaccacacctttaatcccagcactccatgagtgtgaggcagcctagtctacaggctacacaggaaccctgtcctgaaaaatgaaggaggggaaaaaaaagaaagaaaaaagaaaaaacaaactaaaaaccaattttaaataccttaaaagttctgtctctttagaatatccaaaagttcactctttctctggccttatcttctttctgccctttccctccccccttctcttctcccttccccctctgnnnnnnnnnnnnnnnnnnnnnnnnnnnnnnnnnnnnnnnnnnnnnnnnnnnnnnnnnnnnnnnnnnnnnnnnnnnnnnnnnnnnnnnnnnnnnnnnnnnnnnnnnnnnnnnnnnnnnnnctctaaaatttcaatgtctttttgaagttaaaatctctgaactatggctacttgtaaaataaataagttacctaggttcttgttctaagaaggggaataagggcacagtcacggtcaacttgcgagcacccagagtccagcagtgtaaagccaggtgtcacactactactgtctgacactcactctccctcttctgggctccttcaaaatgcctggtggctgtctgcagcacatgcagcttgtcctctaggctcaggctggctacatgccacagctgctgcgacccctggtggtcaggtcaccatggtactgccatacccaatgcttgagtccccattgcagctgagctgctcctgggacaataacatctctcgggctttcttcagggactctccacccctgccacatgataccaagcattatattgccatgacgccttcaatcctgagccttctactgcagggggagcatccgtggcctggcctggcctctcatggtgccaaagcctcagctgttcttcacaacccctatatgccttcaaaaccagtatagggagagccttccactaccaagttcagatgccaacatgaggtgcagcctcagctccctctgggccatgagcttctgtgtgctcatcctgaataaacacttgagaataatttacctcagtgctgctggtctcctaatctgggctgattctgcagctcccagctgaccagtatcacttgtctcagccttagagtacttgagggactcaagacttctctctcaaacatcacaagccaggccaccaccatctgcactactctttttttttttttttttttttttttggtttttcgagatagggtttctctgtatagaccaggctgggctggccttgaactcagaaatccgcctgcctctgcctcccgagtgctgggattaaaggcgtgtgccaccatgcctggtttgcactactactttcaccatttgctgcattcccacaattcattaaactctgaacactcgagtgcttttctagtctgaagttccagaggccatgcacaatcctccaaaatacatgctcaggtctgtcacagtaatgccccaaggcctggtaactaatttcttaattagagcttctattcctgtcataaaacaccatgactataagcaacgtaaagggtttatagtccatccaaagaagttaggacaggaactcaaacaaggcaggaacctggaggcagggactgaggcagaagccatggagggtcctgcttactggcttgtttccatggcttgctcagcttgctttcttatagaacccaggacaactggtctaggggtggccccacccacaataaggccctcccacattaatcagaatgtgccacaggtttacccacaggccagtcttatgggggcattttctttattgagattttcttttccataataatacctagcttgaaactaaccagcactgctaggcagtgggggcacacacctttaattccagcacttggaaggcacaggcagttgaatttggggctagtcttgtcaacaaaccaagttcaaggacagccagggctacacaaagaaactttgtctcagaaaatagaatgaaacaaaaacaaaccagcacacacaggaacagtagctcttgtctgtggggccacataactatctgaaccttgaccagactcagttctgggattaactttccctaaggaaattaataagggaagaaggtgagctcacagaagtaaatttcacattaggatagtgttttcaaagccagatcgtccaggccccagagcctctctatgtttttcttggcggataaggaagcagaaagagtttatctgaaggatcatgccgtggggcaggggcgaaaggtgtttccagaatgccttaggaagcctcacagaaggaaggcagagtacgatagcatactgtttccattgatgagtttgcttaatcctttaaaatactcttctctctgacttactgtgaggcatggtggtgtacactcgtaagcccagcacttggagatggatggaagcaggaagatcaggagttcaaggccagcctctactatgtagcaagtttgaggctatcccaaactatattccaccctttttcaaccccactctacctgctccccaaatttatattctgactaattctctctaaagacattgccagatagttaacaaagtttaatgtacaaaagtcttcacaatggaattgattatatgtcttatcaataaatgacccaaggcgggaacttggttaagctccgtagaatactggctatttgtgtgtagcagattaggcaggcaagatggaggagcgctaccaggcgagggttctgttgagcccaagaggctctgtgatgcgggcgtgagcatggatgtgatgtgacgccgccacacatgactactttttgctgcttttttactcaattagaattcaggaacaggaaagcagttgaggttctcagaggcatccggttcatccctgacggaaaagctgaagctcctggaaaggctgatccagagctcaagggcggaagaagcagcctccgagctgcacctctctgcactgctggagatggtggacatgtagctgtctgacgggagacggatctctaattcataatgctttgtctgtattcaattgtgttatagatgctgttggaaatgtgactattaattatgcaaataaactttttgaatcattccagagccgccttagttttatgaatgaaggctatgtgatgtctttagtaggtttggtttttttttgttttttggtttttggtttttggggtttttttttggtgatcttagacttttttctctcacacacaccggaaaatactcagagggagtttttgtgactttctggttttcagtacacacttattttgagactttcatgcgtgagtgtactgtaattagatcatttctacccctccccctccacactctgggattcatgacctagtcttctataattgttacatatacatacgtctactgagtctatttaatgttgcttgaatgtatatgtgcttagggatgaccatatgggattggagaacctatcagagatctacctggaaaaaaccgattctccctcccttggtaatccattgactgcttattctgtttataatagataattctcttagtaaagtcattgcccctgatatcttagctatcagaaatgcagggacaagtaagacacagggtcctcactgcaaggtcaaccctgcttatcaggagagccaacagacagacagacagacagacagacagacagacagacagacaaaaatacatatataagtcgtagtagtatacatagaatgtagtacatacatagaatgtagtagtgtccatgagagggcatgatgaactccttgaggcaccagttggttgtgaggccaaatggatggaacaggccagcaggctctcactacactcagagggccatggggatcagttgtggaaaaacattagaaagaagtgacctgatcctattttctcttaaaaaataacatgtggaagaggttggcgagatggcttgtcacattacacttgttcttggtgaagaacccgtggttcccagaagacctgacaccctcttatgacctctgtggcaccacacctgtctgtgcactacaggaatgcagaacacccatacacataaatatatcaaatggcattttgcaaggaatggaagatgtactaataaaattagcgatggtcatttctcttatattgtgcactaagcatttccagactatcatcctatagcccccagagtctattcaagaggagtatgcagtatctctggtccttccttgttcagttcactgtgtaaaaagccctggaagaaatctgctctggccatcctcaaaactaccagtaaggctccctccctaccccccgccccgtgaccctccaaatattacatcttttagactttacaatttttttgtcctatgtatattaatgataactttacattctgtatgtgtatgggcaagtgtgtgccagtgcacatgtgaaggtcaagctgtcctctgacttccatgcatatgaggcagcacatcacaggaactttcaggagtcagttctctccttccgccatatgcaactgggaatgaactcaggtcattgggcttggaggcaagcagccttaacccctgagccaccttgctggcacaaatctctgtgtgtgtgtgtgtattgtgcgttcttgcatccatgaagggcttagagaacaacttttagacttctccccttccgtcctcattgaggcagggtctctcatttatgtgctgtacagtatatctcaggctagctgacccttgcgcttccagccaattctttttttttttaaattcattttatatgtcttgagtgtttcacctgcatgcacacttgtgtaccatgtgcatacctagtacccatagaggcagaagagggtgtcagattccctgaaactggagttatatagagttgtaagccaaccacctgggtattgaggctcaaacccaggtcctccagaagagcagctagtgtttgtaaccaccaagccaggtctccagtccttccagccaattcttgtctctatctccattttcatattaggagtgccaggctcacaggatacacaccactgcttcctgtgtgtttgcaggatcacacacaggttattagttgtgtagcatgtacttttatctgagccatctccccaagcttttcccctcttcagtggctcactgtttatcaagaaagacttgatgttattttaagcatttctttattgcgtgtgttacttttctgttgctgtaataaggcaccatagtacatacatttattggggttgtttagagggtatttaggatgtttaggggtatagcaggcagtaggaaggcaggcatggtgctggagcagtagctaagggttttcatcttgatccacaagcagggaacagagctaactggaagtagcctaggcttttgaaaactcacccccctcaccccagtgacacacctcctccagcaaggccacacctcctaatccttcctaaacagttctaccaacaggggctccagtactcatgtgcagaagtcaagggaaactacaattttgtcctaccatgtaggttctgaattagcctacagcttttatggttgggggcaagcagttctgtctgctttgtcatcctgtaggctccttcatgttactccttaaccttgctttaattgtgacattcttttcctgcctccagcctcccagcccagagagggtagtggtggagtcacggagtaggactctggtgatggctttaaagtctgaggtctttctagctctctatctgtactgaaatgctgacaataacttctaaaaggtcctagaaactttcttgctttctgagggtaaagacttaggcgattaacacctgtagcctaacagtggaggattaagcaatgcggcctttgttctgtctcagcaggaactgctgggctctaattttcagcctgctagtcagaagtcaggaagaaggctgttagtcagaaggcaggaagaaaaggggacacttagaaaagtgattatagtacttattactaagttgtaaaaagtttcctatgaaagctatctaaggggaaaagcagaaagatcctagtctgggaaagggaaaaattcttctaagtgaggaaaggcaaaaaattctctcttgattctcttcatctctttgtcctcggtacttatacacctttcagaatacatgatcacatgtcacaaagttcatcacaaggtcacatacaaaatcaaatcataaattgaaatagaagttgacaacagtgaatgtgtacatgcatatccattaggagtaattatctggctaagcatccatcacctgtctcagctccacaggttcactggaggtttaaaaccataactaaattattagtgaagttttgtctagataagcccagtcaatattttatcttctgtcctagcacctataataaatcattagttccatttttttaattaggtattttcctcgtttacattttcaatgctatcccaaaggtcccccatacccacccccccaatcccctacccacccactcnnnnnnnnnnnnnnnnnnnngaaggtgcacagttatctggtgtttggacctcctcctggctgaagatgaaggcccaaaacaggatctttcccagaagctgtgttgctttggccaggaaggtggccagttgtctggagccgaagatggcgccacctcagaagctctgtggctctcgcctgtcccagaaactgctggcctctgtattccacaccctcacccgtgcagcctgccctcctcggagtcccggaaccaaggtggctcccgccggggcctgaggcagaaacctctcgggccgggcggacccctgtgttctcaccaggaaggtggccggttgtctattagttccatttttatggcctttggtgaattgttttataacctcttggaatgtgctctgagtaggagaaagtctggtaaccatctgagagcaattaactggtgacacttgagagactgagttctcactgcagttttgactatcagaaaaggacctgatagcagtcccgctatgaaagagcttaataatcacatataattttaggaattctttctttttttttttccgagacagggtttctctgtatagccccggatgtcctggtactcactttgtagaccaggctggcctcgaactcagaaattctcctgcctctgcctcccaagtgctgggattaagggtgtgtgccaccactcccggccaattttaggcattcttataagatcatcattaggacttaagtcatctatttgtttatatagcatcactacaagacagtggggtctgcagagtatctgctccaaaggggtgtgctactacttagtgattgttatatatgtttaataataacaggaaaagcatattaatagcaggaatctttcctaaaatgaatcccttatagccttgtttaataagggtgtacctgtcacagattatataataatccgaagcaggccatttcaggatgatcacctgctagttattagcttgtcccattatggctcctaacattttcctacaataaaagtactatctgccctacaatgtatatcacacatacatatatgcctatattttctctactacgtgtctttttcatcagttcaatgttggctgaattcgaagttcaggctgactttgtttcctcatagcagctgaatctgttactgagtcatgactttatttcactctggtgcaattttggctctccctgccttgttttattctatgttcttgccactacttcactcaaaactctcagtacatccaacacagccttgtttgtaaggtagagttctagttccgttttctcatgacaaccctttgggaaccatatctctctgtaacggcttttgcatccagaatgtctttatttctccttatatttgattcaatatttcagtgagagtaacattttagattggcaattattaccttttagtcttctttctttctttctttctttttttttttttttttggtnnnnnnnnnnnnnnnnnnnnnnnnnnnnnnnnnnnnnnnnnnnnnnnnnnnnnnnnnnnnnnnnnnnnnnnnnnnnnnnnnnnnnnnnnnnnnnnnnnnnnnnnnnnnnnnnnnnnnnnnnnnnnnnnnnnnnnnnnnnnnnnnnnnnnnnnnnnnnnnnnnnnnnnnnnnnnnnnnnnnnnnnnnnnnnnnnnnnnnnnnnnnnnnnnnnnnnnnnnnnnnnnnnnnnnnnnnnnnnnnnnnnnnnnnnnnnnnnnnnnnnnnnnnnnnnnnnnnnnnnnnnnnnnnnnnnnnnnnnnnnnnnnnnnnnnnnnnnnnnnnnnnnnnnnnnnnnnnnnnnnnnnnnnnnnnnnnnnnnnnnnnnnnnnnnnnnnnnnnnnnnnnnnnnnnnnnnnnnnnataaaatttgaaatgtaaataaagaaaatatctaataaaaatatttaaagttattttttttttattcctgtgtgtgtgtgatgtgtgatgtgtgtgtgatgtgtggggcatgcatgccactgagtgtatatggagatcagaggacaactttgtgtagtcaattcttctacccaggcttgtacaacaagtgcctttacccatacccactaagccgtcttgcaggccctttcttcaaatttttaagattgtttctgggggtggtgtgtggacttctagaaattggggcacaaagtgaggatgagtatgatcaaaacacatcatatacatttgtgaagttaaaatttaaaatactgtattacatcacttctgtccatggtattctcaaatgtctcaactctctgccctcgattaggttttttccctaacttatattactattaaacaaacttattctaaacataatagctttaaaatgaggagtcccctgggcagctttttcttggcacttgtcttgtagtttagtgaggtaatgccgagacacagacgtctgatggttctgttgggcttcatgtccatgggtgggcagagggaggggttcttgctgggtttccctctactgcttgctcatgcatgctgacaatggagctctgaatcagggagcaaagtctacccactgaggatttctctagtttttctactagtccccaatgcctggaggtcttttcttctttttgtgtgtgcatgtgttcatgtgagtatgtgcatatgtgtacgcgtgcatccttacatgtatgagggtcagatgtggaccaggaagtcttccttgtttgcttgtttgtttttggagaccgggtttctcactgaccctgagctcaccatctcctttaggctggctggctaacgacttgttctgcttctgctcctccagcactgggtctgtagagatgtgctactcggtttggtttacatgtggatgacagggatccaaactctagcccttgagcttgtgagccaggcacagaactgagctatctcatcaaagcactccctgccctccctctctctcctccctcccacctctgtctttccctctggtgatcatgctatgtaactcgggctggccagaatcacaattctcctgcctctgaagtgttgaaattatacccacgtgccaccatgcccaatgcactacagaccagttgccttagagaaatcttgactcctgtctcaggctagctgttggaatgtgagagggaggactggattcccctacgagtgcaaattttcaatttctctggttttgatgatatccagctatgcctcatctgccttttactcagctgctcaaggcttccacccagtcagaacactaaaactatgataatggggggctggagagatggcttagcggttaagagcactgactgctcttccagaggtcctgagtttaattcccagcaaccacatggtggctcacaaccatctgcaatgtgatctgatgccctcttctggtgtgtctgaagacagttacagtgtactcatacataaaataaataaataaatttaaaaaaaccctatgataatgttccttcaaggttttcactgctccctccagactctgttaattcaagggttcgttccctggcgagaactgtcatttcttgctggctttatctacacatagaggttttcattttctctgctttgccgaatcagtcattcctccatctacttctagtctttataattttctttaaaatattttctaaaatccagagcttcaaacatgcatatagtgtgttttgattgagtccacccctcattccctcccttctggatcctcccctctcccccgttccttttcacttctgtcctgggtttttaatgtctttgtctttggactgggacatgggcaggaaacagaaatcaacatctatgtccagcctggtgtttttaaatagaaatatctttcttttcctgtcatctctgactcctaaggcagctcctaggtcagtaactaatcatttccccacgtccaatcagcaagtaccatcaaccccattttatagtctccccagagtcagtaactaatcacttcccccacatctaatcagcgattgccatcaactccatcttgtactcccttcagggcttcacttgctttctttgaccctagtcccttagttttcctcctcgatggaccaggaaagtcgagcttctctgttcagtttctagttgatcttatcgaatctcatgatttcaaatgccacccgatgactctcagatttctttatctagccttgttctcttttctgaataccagtctacttaaaactacttaaactcggatgcctaatatttgtcaaaatgaattctccgtgaaatttccaagctcctctgacctttcctaacttctacatacagataaggcttttccccttggcctgtcttgaaacccttaggctccagggtctttgtcagccaaggctttcccaatcttcatatagctaagaacattgccttccttgtcaatggaagctcactctacacccagttgtccaggtcccaaaccctagagtcttctgtatttagtttatagaataagctcaatatggtacaagccaagcagtgacaaacatttcttacaactgtctctagaaatccatctatgtgaattggcaggaggatttcacacttttcttccttagatattagaaagcatattactttattcataggatgtctagtccaggaaaatatcaacctaacttcttttgcagctgatatctctgccatctgtctagctttgccattcaagtctggggttccgtacggaccagaattctttttttccaatttttcatgttctgacacaaaaaggacttccctggaaaacactctagcttttttctccagggaaagagagtggcttgtttagtgaatttgggagaacagcatccagtgtgctaggcttccctgggcatcgttttttgggtcttcttattggcatactgtgcttacatggttcttggtgggtcagctcccaaaggcttcagttgttcgcttggcttagaagctgagacatgtgtaagggaaaagcagtcattatgaagcagttagccagccctgttcaaactgacttttttttttttttttttggcttttttgtttttgtttttgtttttcgagacagggtttctctgtatagccctggctgtcctggaactcacttttgtagaccaggctggccttgaactcagaaatctgcctgcctctgcctctggagtgctgggattaaaggcgtgtgccaccacgcccagctcaaactgacttttctattgtgaattttaaaaacttaatgtgtacgggtgttttaaccagcatgtatgtacttacatctcacacatgcctggtgactgaggaggtcagaaaatggcattagattccttaaaactgaagttatagatggctgtgagtcaccatgtgggtgctataaaccaattccaggtcctctgaatgagcagcaagtgctcttacgcactggacttaagtattggcctccagtccccaaatcaatagtctgaggcaaggctcagttaaaatgccttgtcttatatctttacaagtttctaaactgggcaaagaagaggttagtgttcttgactagccatctaaaattccgattttccatctagggaaggtgtgtgagtgttctttgcctcttacttcttccttctctgatttgtggttcatggccccttccttggcagcgttttgagggctaggtgcagggaggctatcgggtttgggtagttgtaagtaagtcggcactctgtaggacacactgtaccgctgggagttcttggaattatatttttctgatctctggtcgtcattcctgcatgccagcaatgcttctcaaatactatctgttcaaatgttcttcattgcacgtctctactagattctgccggcataccacaggctttcctgcttccctctctactgtcaaacataatcaaggcttttccccctttaacttgtaggactccaagctccaggtatcctgagagtagtgctgtggctagggaagtggaactctacctgctaatgggagtcaggacacagccctctgcacactctgcagctgctccctgtgaggagcctgtgcccgctttctgagaacactactctgaccctcttcccaactacgtgtcatcatagtttcctcctcccttcactcgggtcaaggcccctgccccatgatggtccatgtggtgcctcggatcaacgctagtttcacctcaggtcactcatgcctcttccgtacttctgaagcactcgtggtttccgcggcctctttcctgcatgtcggaggggccatttttcaccaaccctgtaggtatcccggctcagaacacccagaccagaagtccaaggctgtcatcaataaggatctagaggggccggccccgccccccatcccgccccgcccctccaacgggcctgcccctcccacaggccgtcctcgcccacaggccggcctctttcataggccccgcctccaaagcgcttcccgccccgcagccacgccccctggtgccctcgcggcgtcgggcggccctgcgcccagccactgtggtcgcggtgcgtctctcgtgcccacctggtgatgctctgattggccgagctcgcatcggcccacccag

SEQ ID NO: 170 - DNA, 6429 bp, Mus musculus
gttgcggtgcggtgggcccggtagaggctgcacgcagactgtgggcgagcacaagcgctggcgacagtggccgtatctggcggacttgctcctccctccgcggcctccgctgtcccttgtgtctttgccgagttgctgaaggccttcactagtcttcgctcgaaggcgtctgttaacctagcggccggcttccggagtgttaagcatcggggataaaaagctattatttctagaccagggcatcgcaagttcgagttaccgggagaaaaatgagatggtcatcctgaggatgaaggagagcttcccctggcaacagataatttaaagaggagagctacttgtgtatagtccatatttattgccttcagataattggcttgaagatgcacccggtgaaccccttcggaggcagcagcccaagtgcttttgcggtatcttccagcaccacgggaacatatcagactaaatcaccatttcgatttggccagccttccctttttggacagaacagcacacccagcaagagcctggcgttttcacaagtaccaagctttgcaacaccctctggaggaagccattcttcctccttgccagcatttggactcacccaaacctcaagtgtgggactcttctctagtctcgaatccacaccttctttcgcagctacttcgagttcctctgtgcccggcaatacggcattcagctttaagtcaacctctagcgttggggttttcccaagtggcgctacttttgggccagaaaccggagaagtagcaggttctggctttcggaagacggaattcaagtttaaacctctggaaaatgcagtcttcaaaccgataccggggcctgagtcagagccagaaaaaacccagagccagatttcttctggattttttacattttcccatcccgttggtagcgggtctggaggcctgacccctttttctttcccacaggtgacaaatagttcggtgactagctcaagttttatcttttcgaaaccagttactagtaatactcctgcctttgcctctcctttgtctaaccaaaatgtagaagaagagaagagggtttctacgtcagcgtttggaagctcaaacagtagcttcagtactttccccacagcgtcaccaggatctttgggggagcccttcccagctaacaaaccaagcctccgccaaggatgtgaggaagccatctcccaggtggagccacttcccaccctcatgaagggattaaagaggaaagaggaccaggatcgctccccgaggagacattgccacgaggcagcagaagaccctgatcccctgtccaggggcgaccatcccccagataaacggccagtccgcctcaacagaccccggggaggtactttgtttggccggacaatacaggaggtcttcaaaagcaataaagaggcaggccgcctgggcagcaaggaatccaaggagagtggctttgcggaacctggggaaagtgaccacgcggccgtcccaggagggagtcagtccaccatggtaccttcccgccttccagctgtgactaaagaggaagaagaaagtagagatgagaaagaagattctctcaggggaaagtctgtgcgccagagtaagcgaagggaagagtggatctacagcctcgggggcgtgtcttctttagagctcacagccatccagtgcaagaacatccccgactacctcaacgacagagccatcctggagaaacacttcagcaaaatcgctaaagtccagcgggtcttcaccagacgcagcaagaagctcgccgtgattcattttttcgaccacgcatcggcagccctggctaggaagaaggggaaaggtctgcataaggacgtggttatcttttggcacaagaagaaaataagtcccagcaagaaactctttcccctgaaggagaagcttggtgagagtgaagccagccagggcatcgaggactccccctttcagcactcgcctctcagcaagcccatcgtgaggcctgcagccggcagcctcctcagcaaaagctctccagtgaagaagccgagtcttctgaagatgcaccagtttgaggcggatccttttgactctggatctgagggctccgagggccttggttcttgcgtgtcatctcttagcaccctgatagggactgtggcagacacatctgaggagaagtaccgccttctggaccagagagaccgcatcatgcggcaagctcgagtgaagaggacggacctggacaaagccagggcatttgttgggacttgccctgacatgtgtcccgagaaggagcggtacttgagggagacccggagccagctgagcgtgtttgaagttgtcccagggactgaccaggtggaccatgcagcagccgtgaaggagtacagccggtcctctgcagatcaggaggagcccctgccacatgagctgagaccctcagcagttctcagcaggaccatggactacctggtgacccagatcatggaccaaaaggaaggcagccttcgggattggtatgacttcgtgtggaaccgcacccggggtatacggaaggacataacacagcagcacctctgtgatcccctgacggtgtctctgatcgagaagtgtacccgatttcacattcactgtgcccactttatgtgtgaggagcctatgtcttcctttgatgccaagatcaacaatgagaacatgaccaagtgtctacagagtctgaaggagatgtaccaggacctgaggaacaagggtgttttttgtgccagtgaagcagagtttcagggctacaatgtcctgcttaatctcaacaaaggagacattttgagagaagtgcagcagttccaccctgacgttaggaactccccagaggtgaacttcgctgtccaggcttttgctgcattgaacagcaataattttgtgagatttttcaaactggttcagtcagcttcttacctgaatgcgtgcctgttacactgttactttaatcagatccgcaaggatgccctccgggcactcaatgttgcttatactgtaagcacacagcgctctaccgtcttccccctggatggtgtcgtccgcatgctgctgttcagagatagtgaagaggcgacaaacttcctcaattaccatggcctcactgtagctgatggctgtgttgagctgaatcggtcggcattcttggaaccggagggattatgcaaggccaggaagtcagtgtttattggccggaagctgacggtgtcagttggggaagttgtgaatggagggccgttgccccctgttcctcgccatacacctgtgtgcagcttcaactcccagaataagtacgttggagagagcctggctacggagctgcccatcagcactcagagagctggtggagacccagcaggtggtggcagaggagaggactgtgaggcagaggtggacttgccaacattggcggtcctcccacagccgcctcctgcatcctcagccacgccggcgcttcatgtccagccactggccccagccgcagcacccagccttctccaggcctccacgcagcctgaggtgctgcttccaaagcctgcgcctgtgtactctgactcggacctggtacaggtggtggacgagctcatccaggaggctctgcaagtggactgtgaggaagtcagctccgctggggcagcctacgtagccgcagctctgggcgtttccaatgctgctgtggaggatctgattactgctgcgaccacgggcattctgaggcacgttgccgctgaggaagtttccatggaaaggcagagactagaggaagagaagcaacgagctgaggaggaacggttgaagcaagagagagaactgatgttaactcagctgagcgagggtctggccgcagagctgacagaactcacggtgacagagtgtgtgtgggaaacctgctctcaggagctacagagtgcagtaaaaatagaccagaaggtccgtgtggcccgctgttgtgaagccgtctgtgcacacctggtggatttgtttcttgctgaggaaattttccagactgcaaaagagacactccaggaactccagtgtttctgcaagtatctacaacggtggagggaggctgttgcagctcggaagaaattccggcgtcagatgcgggccttccctgcagcgccatgctgtgtggatgtgaatgaccggctgcaggcactagtgcccagcgcagagtgccccattactgaggagaacctggccaagggtcttttggacctgggccacgcaggcaaagtaggcgtctcctgtaccaggttgaggcggcttagaaacaagacagctcaccagataaaggtccagcacttccaccagcagctgctgaggaatgctgcatgggcacctctggacctgccatccattgtgtctgagcacctccccatgaagcagaagcgaaggttttggaaactggtgctggtgttgcctgatgtggaagagcagactccagagagtcctggcagaatactagaaaactggctaaaggtcaaattcacaggagatgacagcatggtgggtgacataggagataatgctggtgatatccagaccctctcagtctttaatacacttagtagtaaaggggatcaaacagtttctgtcaacgtgtgtataaaggtggctcatggcacccttagtgacagtgcccttgatgctgtggagacccagaaggacctgttgggaaccagtgggctcatgctgctgcttcccccgaaagtgaagagtgaggaggtggcagaggaggaactgtcctggctgtcggctttactgcagctcaagcagcttctgcaggccaagcccttccagcctgccctgccgctggtggtcctcgtgcccagctccagaggggactccgcggggagggcagtagaggacggtctgatgttacaggatttggtttcagccaagctgatttccgattacattgttgttgagattcctgactctgttaatgatttacaaggcacagtgaaggtttctggagcagtccagtggctgatctccggatgtcctcaagccctagacctttgctgccagacccttgttcagtatgttgaggatgggatcagccgcgagttcagccgtcggtttttccacgacaggagagagaggcgcctggctagcctgccctcccaggagcctagcaccattattgagttgttcaacagtgtgctgcagttcctggcctctgtggtatcctctgagcagctgtgtgacatctcctggcctgtcatggaatttgccgaagtgggaggcagccagctgcttcctcacctgcactggaactcaccagagcatctagcgtggctgaaacaagctgtgcttgggttccagcttccacagatggaccttccacccccaggggccccctggctccctgtgtgttccatggtcattcagtacacctcccagattcccagctcaagccagacacagcctgtcctccagtcccaggcggagaacctgctgtgcagaacataccagaagtggaagaacaagagcctctctccaggccaggagttggggccttctgttgccgagatcccgtgggatgacatcatcaccttatgcatcaatcataagctgagggactggacaccccccaggctccctgtcacattagaggcgctgagtgaagatggtcaaatatgtgtgtattttttcaaaaaccttttaagaaaataccacgttccctcgtcatgggaacaggccagaatgcagacgcagcgggaactgcagctgagtcatggacgttcggggatgaggtccatccatcctcctacaagcacttttcctactccattgcttcatgtacaccagaaagggaagaaaaaggaagagagtggccgagaggggagcctcagtacagaggacctcctgcggggggcttctgcagaagagctcctggcacagagtctgtccagcagtcttctggaagagaaggaagagaacaagaggtttgaagatcaacttcagcagtggttatcgcaagactcacaggcattcacagagtcaactcggcttcctctctacctccctcagacgctagtgtcctttcctgattctatcaaaactcagaccatggtgaaaacatctacaagtcctcagaattcaggaacaggaaagcagttgaggttctcagaggcatccggttcatccctgacggaaaagctgaagctcctggaaaggctgatccagagctcaagggcggaagaagcagcctccgagctgcacctctctgcactgctggagatggtggacatgtagctgtctgacgggagacggatctctaattcataatgctttgtctgtattcaattgtgttatagatgctgttggaaatgtgactattaattatgcaaataaactttttgaatcattccaaaaaaaaaaccat

SEQ ID NO: 171 - DNA, 5916 bp, Mus musculus
atgcacccggtgaaccccttcggaggcagcagcccaagtgcttttgcggtatcttccagcaccacgggaacatatcagactaaatcaccatttcgatttggccagccttccctttttggacagaacagcacacccagcaagagcctggcgttttcacaagtaccaagctttgcaacaccctctggaggaagccattcttcctccttgccagcatttggactcacccaaacctcaagtgtgggactcttctctagtctcgaatccacaccttctttcgcagctacttcgagttcctctgtgcccggcaatacggcattcagctttaagtcaacctctagcgttggggttttcccaagtggcgctacttttgggccagaaaccggagaagtagcaggttctggctttcggaagacggaattcaagtttaaacctctggaaaatgcagtcttcaaaccgataccggggcctgagtcagagccagaaaaaacccagagccagatttcttctggattttttacattttcccatcccgttggtagcgggtctggaggcctgacccctttttctttcccacaggtgacaaatagttcggtgactagctcaagttttatcttttcgaaaccagttactagtaatactcctgcctttgcctctcctttgtctaaccaaaatgtagaagaagagaagagggtttctacgtcagcgtttggaagctcaaacagtagcttcagtactttccccacagcgtcaccaggatctttgggggagcccttcccagctaacaaaccaagcctccgccaaggatgtgaggaagccatctcccaggtggagccacttcccaccctcatgaagggattaaagaggaaagaggaccaggatcgctccccgaggagacattgccacgaggcagcagaagaccctgatcccctgtccaggggcgaccatcccccagataaacggccagtccgcctcaacagaccccggggaggtactttgtttggccggacaatacaggaggtcttcaaaagcaataaagaggcaggccgcctgggcagcaaggaatccaaggagagtggctttgcggaacctggggaaagtgaccacgcggccgtcccaggagggagtcagtccaccatggtaccttcccgccttccagctgtgactaaagaggaagaagaaagtagagatgagaaagaagattctctcaggggaaagtctgtgcgccagagtaagcgaagggaagagtggatctacagcctcgggggcgtgtcttctttagagctcacagccatccagtgcaagaacatccccgactacctcaacgacagagccatcctggagaaacacttcagcaaaatcgctaaagtccagcgggtcttcaccagacgcagcaagaagctcgccgtgattcattttttcgaccacgcatcggcagccctggctaggaagaaggggaaaggtctgcataaggacgtggttatcttttggcacaagaagaaaataagtcccagcaagaaactctttcccctgaaggagaagcttggtgagagtgaagccagccagggcatcgaggactccccctttcagcactcgcctctcagcaagcccatcgtgaggcctgcagccggcagcctcctcagcaaaagctctccagtgaagaagccgagtcttctgaagatgcaccagtttgaggcggatccttttgactctggatctgagggctccgagggccttggttcttgcgtgtcatctcttagcaccctgatagggactgtggcagacacatctgaggagaagtaccgccttctggaccagagagaccgcatcatgcggcaagctcgagtgaagaggacggacctggacaaagccagggcatttgttgggacttgccctgacatgtgtcccgagaaggagcggtacttgagggagacccggagccagctgagcgtgtttgaagttgtcccagggactgaccaggtggaccatgcagcagccgtgaaggagtacagccggtcctctgcagatcaggaggagcccctgccacatgagctgagaccctcagcagttctcagcaggaccatggactacctggtgacccagatcatggaccaaaaggaaggcagccttcgggattggtatgacttcgtgtggaaccgcacccggggtatacggaaggacataacacagcagcacctctgtgatcccctgacggtgtctctgatcgagaagtgtacccgatttcacattcactgtgcccactttatgtgtgaggagcctatgtcttcctttgatgccaagatcaacaatgagaacatgaccaagtgtctacagagtctgaaggagatgtaccaggacctgaggaacaagggtgttttttgtgccagtgaagcagagtttcagggctacaatgtcctgcttaatctcaacaaaggagacattttgagagaagtgcagcagttccaccctgacgttaggaactccccagaggtgaacttcgctgtccaggcttttgctgcattgaacagcaataattttgtgagatttttcaaactggttcagtcagcttcttacctgaatgcgtgcctgttacactgttactttaatcagatccgcaaggatgccctccgggcactcaatgttgcttatactgtaagcacacagcgctctaccgtcttccccctggatggtgtcgtccgcatgctgctgttcagagatagtgaagaggcgacaaacttcctcaattaccatggcctcactgtagctgatggctgtgttgagctgaatcggtcggcattcttggaaccggagggattatgcaaggccaggaagtcagtgtttattggccggaagctgacggtgtcagttggggaagttgtgaatggagggccgttgccccctgttcctcgccatacacctgtgtgcagcttcaactcccagaataagtacgttggagagagcctggctacggagctgcccatcagcactcagagagctggtggagacccagcaggtggtggcagaggagaggactgtgaggcagaggtggacttgccaacattggcggtcctcccacagccgcctcctgcatcctcagccacgccggcgcttcatgtccagccactggccccagccgcagcacccagccttctccaggcctccacgcagcctgaggtgctgcttccaaagcctgcgcctgtgtactctgactcggacctggtacaggtggtggacgagctcatccaggaggctctgcaagtggactgtgaggaagtcagctccgctggggcagcctacgtagccgcagctctgggcgtttccaatgctgctgtggaggatctgattactgctgcgaccacgggcattctgaggcacgttgccgctgaggaagtttccatggaaaggcagagactagaggaagagaagcaacgagctgaggaggaacggttgaagcaagagagagaactgatgttaactcagctgagcgagggtctggccgcagagctgacagaactcacggtgacagagtgtgtgtgggaaacctgctctcaggagctacagagtgcagtaaaaatagaccagaaggtccgtgtggcccgctgttgtgaagccgtctgtgcacacctggtggatttgtttcttgctgaggaaattttccagactgcaaaagagacactccaggaactccagtgtttctgcaagtatctacaacggtggagggaggctgttgcagctcggaagaaattccggcgtcagatgcgggccttccctgcagcgccatgctgtgtggatgtgaatgaccggctgcaggcactagtgcccagcgcagagtgccccattactgaggagaacctggccaagggtcttttggacctgggccacgcaggcaaagtaggcgtctcctgtaccaggttgaggcggcttagaaacaagacagctcaccagataaaggtccagcacttccaccagcagctgctgaggaatgctgcatgggcacctctggacctgccatccattgtgtctgagcacctccccatgaagcagaagcgaaggttttggaaactggtgctggtgttgcctgatgtggaagagcagactccagagagtcctggcagaatactagaaaactggctaaaggtcaaattcacaggagatgacagcatggtgggtgacataggagataatgctggtgatatccagaccctctcagtctttaatacacttagtagtaaaggggatcaaacagtttctgtcaacgtgtgtataaaggtggctcatggcacccttagtgacagtgcccttgatgctgtggagacccagaaggacctgttgggaaccagtgggctcatgctgctgcttcccccgaaagtgaagagtgaggaggtggcagaggaggaactgtcctggctgtcggctttactgcagctcaagcagcttctgcaggccaagcccttccagcctgccctgccgctggtggtcctcgtgcccagctccagaggggactccgcggggagggcagtagaggacggtctgatgttacaggatttggtttcagccaagctgatttccgattacattgttgttgagattcctgactctgttaatgatttacaaggcacagtgaaggtttctggagcagtccagtggctgatctccggatgtcctcaagccctagacctttgctgccagacccttgttcagtatgttgaggatgggatcagccgcgagttcagccgtcggtttttccacgacaggagagagaggcgcctggctagcctgccctcccaggagcctagcaccattattgagttgttcaacagtgtgctgcagttcctggcctctgtggtatcctctgagcagctgtgtgacatctcctggcctgtcatggaatttgccgaagtgggaggcagccagctgcttcctcacctgcactggaactcaccagagcatctagcgtggctgaaacaagctgtgcttgggttccagcttccacagatggaccttccacccccaggggccccctggctccctgtgtgttccatggtcattcagtacacctcccagattcccagctcaagccagacacagcctgtcctccagtcccaggcggagaacctgctgtgcagaacataccagaagtggaagaacaagagcctctctccaggccaggagttggggccttctgttgccgagatcccgtgggatgacatcatcaccttatgcatcaatcataagctgagggactggacaccccccaggctccctgtcacattagaggcgctgagtgaagatggtcaaatatgtgtgtattttttcaaaaaccttttaagaaaataccacgttccctcgtcatgggaacaggccagaatgcagacgcagcgggaactgcagctgagtcatggacgttcggggatgaggtccatccatcctcctacaagcacttttcctactccattgcttcatgtacaccagaaagggaagaaaaaggaagagagtggccgagaggggagcctcagtacagaggacctcctgcggggggcttctgcagaagagctcctggcacagagtctgtccagcagtcttctggaagagaaggaagagaacaagaggtttgaagatcaacttcagcagtggttatcgcaagactcacaggcattcacagagtcaactcggcttcctctctacctccctcagacgctagtgtcctttcctgattctatcaaaactcagaccatggtgaaaacatctacaagtcctcagaattcaggaacaggaaagcagttgaggttctcagaggcatccggttcatccctgacggaaaagctgaagctcctggaaaggctgatccagagctcaagggcggaagaagcagcctccgagctgcacctctctgcactgctggagatggtggacatgtag

SEQ ID NO: 172 - DNA, 44030 bp, Homo sapiens
ggatgctcctgtagtcccagctactcaggaggctgaggtgggaggatcgcttgagcccaggaagttgaggctgcagtgagccaagatctgcactctccagcctgggcaacagaggccctctcaaaaaaaataaacaaaaataaaacatagttaatgttgtatacacgatgattgagcgttagtagaatgttgaccatttttaataactttatttatttatttatttagagatggagtctcgctctgttgcccaggctggagtgcagtggcatgatctctgctcaccgcaacttctgcctcctgggttcaagtgattctcctgcctgagcctccctccccagtagctgggactacaggagcccgccaccacgcccagctaacttagtagagatgggatttcgccatgctggccaggctgatctcgaactcctagcctcaggtgatccacccacctcggcctcccaaagtgctgggattacaggcatgaaccaccttgcctggccgtttttaataactttaaacaaaagagatattcgggtatttttctttagaaaagctcttcaccggcagtggcgcacagaggcagcctcctgtccccgcagccctgtgcactcctgctcagaggctttgtgcttgctgtttccactgctgttccacactcgcagagccgcacggcgctgtctccacctccctgaggccaggcgaggcttggctgccgccctcagcagggcccccaccagcgctccctgctctccctgcccatctgccgcactaaatcaccattctgtgtgtttgatgtgtttgttttctgtggcattggtctctcccctggcatgtcagctatgtggggacagggattgtgtttttgttcactgttgtactctcagcattaaaaacggtgccaggcacagagcaaatgcttgatcagtgttggttgaattaaagaacatcggaagaggactaacagcttaggtaccaaagtcccagcactcaagcagaatttttgttcggattttcatgtttttcctttgtctatttttacttttatttttatttatttatttttttgagatggagtctcactttgtcacccaggctggagtgcagtggcatgatctcggctcactgaaacctccacctcccgggttgaagtgattctcctgcctcagcctccctagtagctggtattacaggtgcgtgccaccacacccagctaatttttgtatttttagtagagatggggtttcaccatgttggccaggctggtctcaaactcctggcttcaagtgacccgcctgccttggcctcccaaagtgctgggattacaggcgtgagccaccacacccagccccattgtcttttttttaagacactggttctcactctgtcacctaggctggagtgcagtggtgtgatcaaggcttactgcagcctcaacctcttgggctcaagcagtcctcccactttagcctcccatgttgctgggaccacaggtgcatgccaccaagccccactaattaaaacaaatttttttttatagagaataggatgtagctatgttgcccaggctggtcttgaattcctgggctcaagtgatcctcccaccttggcctcccaaagtgctgggattacaggtatgagctactgcacctggtctctgtcttctttttttttttttaaggctcttgttagaatgccgtgaacagttgtctccaactattatatgtcattccacgggattggtttcctgctggcattccatggtctccggggtcctctgcagcaccttcctggccttttgtcatgtggatgctgcacagctgacttcacctggtcttgttgatggacagtttgtttcatgatttctcttatgaataaaaccttcacaagccatccttctctatgagagtgtttgcttggcacgcattcctgagcactgcccctgagcagaccgcctatgatctctaagcttgggttccgtgttgccaaagcgccttctggtggactcagcccaggaggagcccatgtgccccacgctggccatggctgtggtcatgggctgactgcatgtgtctgactgggccttcgtctgagactgcagtgatttcgctcctcctctcagatccgcaaggatgctctccgggcgctcaactttgcgtacacggtgagcacacagcgatctaccatctttcccctggatggtgtggtgcgcatgctgctgttcagagactgtgaagaggccaccgacttcctcacctgccacggcctcaccgtttccgacgggtaagagctgagaatggaactgtggggcccctgtctccttttttcttgttaattctgatgaagggctgtgaagggctggctgcttgcctgacttgaagaaggtgcattccctctgccatgcaggtgaacacacgagactcagaatggctgggggtgttcccaaggtcacatcctggctgtcagcacattgagggctcagaccaagttctttgtgactccaaaatcagtccttttcatgacttgctgacaaacctaaagataaaagttagggccttctttattctttcccttgactgcctttgccagccaatgacggacaacctctgacggctgggatggaggcacccgcaggccagccggagtcttctccggtacttaccagtcagagtggtgagactcacagacgctctctcagaaactggcagcttacactcaacacccggtgcctagttccccaccctgtctcctctaactcctcacctgcctcctgcctgtctcctccttccagttctgtctccttctagttctgtctcctccttccagttctgtcctcagaaaattagacggttttgggtgagccagcaaggaggcaggagtgagtcagcgtgcgtctgttaacacgctgggcttagtggttctagggacctacagaggctccagggtgggcggcagtgggacctggcgcctgtgctttctgttatttacacatggctgtggtgacacccaaggggcttgcagtactcggcagggcactgagggcgaagctgtcttctcccctggtgacacccctcgggggtcttttgtggtctgggtagctgtgtggagctgaaccggtctgcattcctggaaccagagggattatccaagaccaggaagtcggtgtttattactaggaagctgacggtgtcagtcggggaaattgtgaacggagggccattgccccccgtccctcgtcatacccctgtgtgcagcttcaactcccagaacaagtacatcggggagagcctggccgcggagctgcccgtcagcacccagagacccggctccgacacagtgggtgagtgaagctgcagtcgtagtgaggggactagctgcattttcccaccagaacgcctcccaggagcctgggcatctgcattttctcgccaggacgcctcccaggagcctgagcacctgtcttgtcttggggcccaggggtgtggctcttcctcatgctcagatggttctcactgggagtggactgagggctttgaagccctcctcctggctccctgacatcctggggcttgtttttcatgcaaagcgtatgttgtcccacgtagctggtctcctggagggcaggccagtcctcagggtcactgtgggtggcctggggctgtccctgcacagacctcggtccccgtggtgccaggcaccctgtgtctgcagctatgttttgtcctgtatgtttccttccaggcggagggagaggagaggagtgtggtgtagagccggatgcacccctgtccagtctcccacagtctctaccagcccctgcgccctcaccagtgcctctgcctcctgtcctggcactgaccccgtctgtggcgcccagcctcttccagctgtctgtgcagcctgaaccaccgcctccagagcccgtgcccatgtactctgacgaggtagggactctttttttctaggtctggactctgggaagcccattgtgcgcaaacgtccttagtcatcaccccatgaggtggggctgtggcgcctggtctctcaggagagtccagagaggggtcctgcctagagtcactcagcctcaggtagggcccacctattcaggctcattctggagtccgtcttcatctcaggagcttcctgtcacagcaccggcctgagcccgtgtgtctgaactcaacacccgtctattcctgacgggatcattggcagcattgtgcgccccctgatgggtgtgacctggggtggcgtgtccgcctggtgggtgtggcctgggtgggtgtgtccccttgggtgtggcctggagtgggcatgtccccctgatgggaccccaatatgcatggactgagtgtgggtgtgtcccctgaagggcatgtcctggggttgggtgtccccactgatgggtgtgacctgggatgggcgtgtcccctggcgggtgtgccccctgatgggcatggcttggggtggctgtgccccctgataggcgtggcctcggggtggtcgtgtcccctctggtgtgtgtggtctctggctgtgcaccctgatgggcatggcctgggggtgggtgagccccttgaccagcctggcctgggggtggatgtgccccttgatggttgtggcctcagggtgggcatggtcccgacaggtgccttgatattgagtagagcctgtcgactccatggttgtgagactggattgtgccactctggctgcttcggggcaggcactgggcaccagcccatctggggatcagggagtgcttagggggagcatagagtggtcacagaaacagaggctgcttgacgtagactggagatggctaggccagggcgctgtgtggccatccgcagggcgccttcctctccagatggcacctttccattcgctaggggacacctttcctgcaacagcctagccgaccccgtgtcaggggttgtgcttctgtcacgagacgcctgcagactgtccggtgacaacatgttacccagcatttctgccctgggtgggacgttccattacaccccatgctggtctctccacaggacctggcgcaggtggtggacgagctcatccaggaggccctgcagagggactgtgaggaagttggctctgcgggtgctgcctacgcagctgccgccctggggtgagtggcatctcgtgctcccctcctgctacgtgctgcggggagctgcacccagtcctccagaagtttcctctcataaagttgcctgcgtttttggagtcataatccaataagttattgccagatacagtgtcaggaagattttcccctacattcttctttttcaagatggttttgctatttggggtctcctgagataccatgcgaattttaggatgagtttttctgtttctgcagaaagtgctgttgggattttgatagggattgcgttgaatctgtagattgttctgggtggtactgtcatctttttttttttttttttttttttttttttttgagatggagtcttgctctgttgctcaggctggagtgcagtggctccatctcagcctcactgtaacctccacctcctgggttcaagcaattcttctgcctcagcttcccgagtagctgagattacaggtgggcaccagcctggctaatttttttattttttgtggagatgcttttcgccatgttgtccagggatggtctcgaactcctggcctcaagtgatccacctgcctcagcctcctaaagtactgggattacaggcatgagccactgcacctggccagtattgtcatcttaacaatattaaatcttctaatctgagaatgtgggatgtctttccatttatttaggtcattcttaatttctttcgacaatgctttgtagttttcaacgtataaagtttttgcctcctaggttaaattgtttttttgtttgtttgttttgttttgtttttgagacggagtctcgctctgtcgcccaggctggagtgcagtggcacaatcttggctcactgcaacccccacctcccggattcaagcgattcccctgcctcagcctcccgagtagctgggattacaggcacctgtcaccaagcctggctaattttttgtatttttagtagagacagggtttcaccattattagccaggatggtctcgatctcctgacctcgtgatccgcccgccttggcctcctaaactgctgggattacaggtgtgagccaccgcacctggccttgttgaggatttttatatccatattcatgagggatattggtctgtagttttccatttctttttttttttttttttttttttgagacggagtctccctgtcgcccaggctggagtgcagtggcgtgatctcggctcactgcaggctccgccccccggggttcacgccattctcctgcctcagcctcccgagtagctgggactacaggtgcccgctacctcgcccggctaattttttgtatttttagtagagacagggtttcactgtgttagccaggatggtctcaatctcctgacctcctgatccacccgcctcggcctcccaaagtgctgggattacaggcgtgagccaccgcgcccggcctcctttttatttctttattccttttttttttcttttttgagacagggtcttactttgtcacctagacccgagtgcagaagcacaatcacagctaaccacagccttgatcttctaggctcaagccatcctctcacctcagcctcccaagtagctaggaccacaggcgcatgctaccatacccggctaattttttaattttttgtagagatggggtctctctatgttgcccaggttagtcttgaactcctgggctcaagcagtgctcccacctcagcctcctgaaatgctgggatgacaggcatgagccactgtgcctgctcagtctgtagttttcctatagtgtctttggtctgtctttggtattagagcaatgctagcctcataaaatgagttagtaaatattccctcctcttcagttttttgaaaggatttgaaaaagattggtggttagtttttcgttagtgtttaatagaatttaccagtgaaaccttctggtctcatacctttctttgtttggaagtctccttactagttataggtctactcacatttttctgtttcttcatgagtcagttttggtagatggtgtgtttctaacagtgggcttaatttttctgctggcagccaaacaagtacaggttgcatatcccttcttcaaaacgcttggaaccacaagggttttagatgacagatatttttggattttggaatatttgtattatatgtaccagttgagtatctcttacctaaaaatctgaaaatctgaattctaaaatgctccaatgagcatttcctttgaaaagcatgacatgttgtgctcaaaaagtttgagattttggagcattttggatttcagatttttggattagggacactcaacctgtgtgttttttttcccttgtcaatgacttggcttttttctgatatttttctttctttttttttttttttttgagacagagtctcgctgtgtcgcccaggctggagtacagtgacgcaatcttggctcactgcagtctcccgctcccaggtccgagcaattcttctgcctcagcctcctgagtagctggggctacaggcgtgtgctgccgcgcctggctaatttttgtatttttagtagagatggggtttcactgtgttggccagaatggtcttgatcttctgaccttgtgatccgcccacctcagcctcccaaagtgctgggattacaggcgtgagccaccgcacccggccttgactctgattttgaatgctatcccctttgctccgtttagtgtttctaatgctgctatggaggatttgttaacagctgcaaccacgggcattttgaggcacattgcagctgaagaagtgtctaaggaaagagagcgaagggagcaggagaggcagcgggctgaagaggaaaggtaagtgtgtcttgtccatgcagccgaataaggagctcagtgtggacacaggcaagaactgaccctagccacgatgctcctgctattgtccactgtgctaccattccacccctgctgacccactcatgccctcctatgcttcagcccagggggtggatggagctcctcaggccacacctacccgtgagcagtggcccttcccagccaggaaaggcaggggaagggaggtggtgtcaggggagctggagtaggggtggcctaccgactcaggcagcacacctcaatccctgtctgcgtggccagggagtaaaacaaacagcacttatttttattcttaaacattacccttgtgtattttttctcttccctgtaggttgaaacaagagagagagctggtgttaagtgagctgagccagggcctggccgtggagctgatggaacgcgtgatgatggagtttgtgagggaaacctgctcccaggagttgaagtaagtgaaacgctggtgtcttgctgtgccaggagagtgagctttggctctgccctaggctgtgtcttgcaccactgaggatgggctattggaaatggatcttgcctgtctaagctactttgattttgtgaccaaatgtatttgatgcagtcctctgtgctcccttggctaatagaattttattataaaaaattctcttttatatgagggctgccaccacatgatcatagtcagccatccttattagccactggcatttatcatatatttgagacacttccaattgattgcacaagtcagatgttgctgatgagaagattttgtggttgtctgcatggtaatttacaaattctacgccaggcacctgtagtcccagcaactcaagagactgaggtgcaaagatcacttaagctcagaagttccaggtagtgtgctatgactgcacctgtggtggccactgtactccagcctgggcaacatagtgagaccctgtctctaaaataattaaaaattctgactattttattaagataaaggtttatttcttaactgttacgagggcccctatggacctataatttggcaccctgttccacttaattctttttaccctgtctttctaggtgtctgtagtttaagtattaaagcttcttttacaatgaagatagaattacattttaatactgaggatgcagactcttgcactttttttttttaaagacggagtcttgctctgtcgcccacactggagtgcagtggcgtgatctgggttcactgcaacctctgcctcctgggttcaagcgattctcctagctcagcctcccaagtagctggaattacaggcatgcaccgccatgcccagctaattttttttttttttttttttttgaaatggagttttactctgttacccaagctggagtgcagtggtgccatctcggctcactgcaagctccgcctcccgggttcacgccattctcagcctcctgagtagctgggactacaggagcctgccaatatgcctggctaatttttcatatttttagtagagacggggtttcaccgtgttagccaggatagtctcgatctcctgacctcgtgatccgcctgccctggcctcccaaagtgctgggattacaggcatgagccaccgtgcctggccgccagctaattttttgtatttttagtagagacggggttctaccatgatggccaagctggtttcgaactcctgacctgaagtgatttgcctgctttggcctcgcaaagagctaggattacaggtgtaagccactgtgcctggccgactcttgcacttttcttttttttttttttttgagacggagtctcgctctgtcgtccaggctggagtgcagtggcgcgatctctgctcactgcaagctctgcctcccggcttcacgtcattctcctgcttcagcctcccgagtagctgggactacaggcgcccgccaccacaccaggctaatttttttgtatttttagtagagacagggtttcaccatgttagccaggatggtctggatctcttgacctcatgatccacccgcttcggccttccaaagtgctgggattacaggcgtgagccaccgcgcctgactgactcttgcacttttcaagcaagccctcagtgtctgtgggccccaagtgcagtgtcttccatgctgattgccctgtttctaggaatgcagtagagacagaccagagggtccgtgtggcccgttgctgtgaggatgtctgtgcccacttagtggacttgtttctcgtggaggaaatcttccagactgcaaaggagaccctccaggagcttcagtgcttctgcaagtatctacagcggtgagtcctgtgttcctacaggcaaaatccacacacacggggaagagtcttttaacaaattcaaaatatatgagctattagtttctgtattcagtggtaaaaggatgagggaaaatgttatagcaatgaatacctaaaatagactaattggattatactgcatttcagaaatacttgattacacacacacacacacacacatacaatataaggggaaaagtcaggagttagattgggacgtggtggctactctgtatgtcaactgatatttatagggtgcctgccatttgcccactgcactaggtgctgggagacagctatgaacaagccagattatggctgcatgcaccaataagggtgaattctcaaaatataagtagtggagaaaaagcaattaatagggaatatacaaatagtgtatattcaaactaaataggttgtttcagatttatatatagtggtataaccctaaagaaaagaaggaaaataatgatcataatctcagcatagtggttacttttgggaatgggaggtggtgcctctcatggccacaacttctcaactgggtgtaagtgcacaggtgcttgatgatttattaatcttataactgggcatatatgtgttacgtatgttgtatgattcatttcataataaaatttaaaatcagtaatagtgtccttggtagttggaacagtataaaagggagtatggggagaagtgagtcttccttctacaacagacccctgtccattgtgcgagcagcagctgcttgcgaaaccatccagagactttctgtcctttcttgtggctcttggcacagatgggctcatgatccctgctttgctctgagccttcctttgctccatctgatatgaggtggaggcttggctgtagcagcatgctgagctgtccccgttgccagtggtcttgaggtcagtgcgataatgtaccataaatgaccttcctggtcttctgttgatggactttcatgtggctctttttttttttttttttgagatggagtctcactctgtcgcccaggctggagtgcagtggcgcaatcacagctcactgcaacctccacctcccaggttcaagtgattcttctgcctcagcctcctgagtagctgggactacaggcgtgcgccaccatgctcggctaattttgttttttttatttttagtagagatggggtttcaccatattggccaggctgctctcgaactcctgacctcgtgatccgcccgcctcggcctcccaaagtgctgggattacaggcgtgagccaccgagcctggacgtagctctttttagctctggtaaagactgttgcagtgactgttgttgtacagacagacatctcacccgtttgcacacaggcacgtgtgtggagataaattcctatcagtggtggctgtgggtcaagggatatatgtatctttttttttttttttttttttttttgagacagagccttgctgtgtcacccaggctggagtgcagtggtgtgatctcggctcactgcaacctccacctcctgggttcaagggattctcctgcctcagcctcccaagtagctgggaccacagtcgcccaccaccatgcccggctaattttttgtattttagtagagattgggtttcactgtgttgcgcaggctggtcttgaactcttgagctcaggcagtccgcccgccttggcctcccaaagtgctgggattacaggcgtgagccactgcacccagctgggtatatgtatcttaaatctgtatccatattgccaagtcagcctccaaagctcattcagtattaactgttaacgttcggtagtttcattgctcaccacactcatttgatgtccttccttccccatgcctgagttctgactgcaatgtgtttctcagtttgaagaccctgaagacactctgtgatgatacattttcatgtccccaggtggagggaagctgtcacagcccgcaagaaactgaggcgccaaatgcgggctttccctgctgcgccctgctgcgtggacgtgagcgaccggctgagggcgctggcgcccagcgcagagtgccccattgctgaagagaacctggccaggggcctcctggacctgggccatgcagggagattgggcatctcctgcaccaggtcagcatcagctgtcgcctgcctcgtcagggctcccctgcccccacttggttttaccaggagcggaattaatgtgtgtgtttggagggtgaagataggtgaagcctggaggcgaagataggtgaagcctggaggcgaggacaggcacagggttgcattttgaaggttgtctcccacagttgtggacatgtgacttgttccactggcaaagcagagctctgagttcaccttgaaagactcagcgtcctggtgcctgagtctgactctgcatcacgtgttcttttcctgctcgtcccagtttaagtacctgccacttccatccttgttggaggagccggaggtccacgctggcctgtgtcttccgatcccatccccgccccatccctctgttcctcccgccgtctccttcacacactgccccctttctgtggcagcatcttccagactccacctccaccctccattatttccctcttgaggccccttggtgtggccctggtcctccctgccactcctcctggttaccccgagcagaaccggctcctcagggccatgccaggacccccctcagcctgcattcctggccatgctgggcttggcctttatttagaacccatgtaggtgccacctcttgcctggcctcagggctccctggcctcccagtgggtggggactggggaggcagcctggagggcctagcaggcacaccgctggggcctcatgtcatgtcttgtcctcctcctggtcatcactggatgttccctctgaaaactgtcttgtgggtttcatttagccccatcaggttctgcgccggcagtggggtggcagtcccagcctgttggaggcatgctgtgaggccagggctgggcctggctcctctgacccatggctgccttcacatagtgacctggccttctcctggagtcatggcttcttgtgtcccccctccgtagctgcccttgtcagcctcagtctccttgtctgagccctccaccctgccccctcagcccagacctctgccctctgcccttctgcgcaccccctggtgatagccctgtcacccctgtctgtcactgacagcccccatcatgcatctccaactgaggcctcttccctgagttccagacttggtttccagttggcagttcaacctctaaacctgatttttccccaccctgccccttcctgctcataggatgccgtcctgtcctcctgcgcttagggcacaaacctgggcttgcatctctctcagacccagcaccgagggcatggcagttctctccacctcactggaatgttgctgcagcacctgtctgccagcttccaccctgggccccaatcgtgtcctcagcaccacaacagagggatcctccaacagctcagccaggtggcgttgcctctcggcggcgtccctagcgctccccgagtctctgcattgtggacccaacccctccctcgctgccctcactgctctccccaaacacaccaggtccagctatggcctggcatagccatgccctctgctgtttccagaagttgtcacgctggctccccctgtttccttcaggtctttgctcacatatcacctgaccaccctgagtgagactgcaacacgcaccctgcctggctccagccccacctggcagcatttgcccacagtgccgacacctcacacatgccaggccagccacttagagatgctgttctctccccattagagcctatgttctcaaagggcaggattttgtctgtttattgctgaatctcccatagccagcacacagtggatacttaacatgatatttgtggaatgaaggaatcctctaacccgtttcattggcagaaaatgtgtttttcagtctcctgagtattccccaggggacactagccagtacttctcactaagctcctgcggggacactgtcattctgctttcctttgcaggttaaggcggctcagaaacaagacagctcaccagatgaaggttcagcacttctaccagcagctgctgaggtctgtcatgctgcacccttctgcgcaccccctggtgatccccgttccccaatctgtcacactggcagcccccttcatgcatctccaactgaggtctcttcgatgagctccagacttggtttctagtttgcagttcaatctctgaacctgattttcctccaacctgccccttcctgctcataggatgtgtgtgctgctcctgcaagggtctcacacactggctaatccacggtggtctgttcctcccagtgatgtggcatgggcgtctctggacctgccatccctcgtggctgagcacctccctgggaggcaggagcatgtgttttggaagctggtgctggtgttgccggatgtagaggagcagtccccagagagttgtggcaggtcaggaagggttttcccctgtggggtttccaagaggtggagtgggcagggcagggttgtgggccagggccgggtattcctcttatgtgtgatgggaactcggaagtgtaggtttatgttttaatgcttggatttacagtctgttttgctcatgattttaagttgaaactttagatttgattatttcaatttttattccataaacttggtgtattagtccgttctcacactgctttaaagaaatatctgagactgggtactttataaagaggtttaattggctcggctgtacaggaagcatggctggggaggcctcaggaaacccacaatcatggtggaaggctaaggggagggaggcatgtcttacatggccaaagcaggaggaagagagagagaagggggagatgccacatgcttaaccagatctcgtgagagctcactatcatgagaacagcaaagtgggaggtgccacacacttctaaacaaccagatctcgtgacagctcactgtaatgagaacagcaagggggaggtgctgcacacttaaccaggtctcgcgaggctcactttcatgagaacagcaagggggagtttccacacacttaaccagatctcctgagagctcactatcatgagaacagcgagggtgagttgccacacacttaaccagatcttgttgagagctcactatcatgagaacagtgagggggagttgtcacacaaccacatctcgtgagagctcactatcatgacaacagcgaaggggagttgtcacacacttaaccagatctcgtgagagctcactatcatgagaacagtgagggggagttgtcacacacttaaccagatctcgtgagagctcactatcatgagaacagccagggggattccacccccatgatacaatcacttcccaccaggcccctcctccaacattggggattacagttcaacatgagatttgggtagggacacaaatccaaaccatattacttggcaacagtcttagaccaaaagcatttaagagttgattgttatttcaagctgtgttaaggtacattgatagacctgcttcattttagactcttcagtaagatagtttatagtctgtttactatagttccatttttttccccttaaagaaacttttggcattttaaaaaagaaaaaattgacatgatcttattttctgtaaccacatagcatacagaagtcatatttttaaagcaactacagtctctttgtgtttttttgagacagggtcttgctttgttgtcacccaggctagagggcagtggtgtgataacagctcaccgcagccttgacctcctgggctcaactgatcttctcacctcagcctcctgagtagctggaactacaggcgtgtgccaccatgcctggttaatgttttttttttaaagatggggtttcactatgttgcccaagctggtcttgaactcctgggctcaagcaatctgcatgcttcagtctaccaaagttttgggattacaggcgtgagccaccacacccggcttacagtttatttttaaaatagctttattgaaatgttattcacataccataaacttcacccatttaaagtgtacatttcagtgatttttagatatattcacagggttttgcaaccatcactgttaataattccagaacaccttttcacttagaaagcctgtattcttttttttttttttagatggagtctcactctgtcgcccaggctggcgtgtggtacactttgttcactgcaacctccacctctcaggttcaagcaattttcctgcctcagcctcccaagtagctgggattacaggcgcacaccaccacgcccagcttagttttgtatatattttgtagagacagggttttgtgatgttgcccaggctggtctcaaactgggctcaagcgatccacctgccttggcctcccaaggtgctgggattacaggcgtgagccactacgcccagctggtgagtcatttcttaaaatagctgtcttctcatttgctaagttcgtatgtcacttaagaattcttaaggtctcaggtatgagaaatttgatctgtaaaaaacatgtatttcaaactctagggatgttttctattgctgaaaatcttaatgcttcagaattttaagtcacattagaatgagccagttccattctaatggaatggagtgccccctcctcctgcccaattaagaacaagtagaagccgggagcagtggctcatgcctgtaatcccagcaactggggaggctgtggagggaggattgcttgagcccaggagtttgaggccagcatgagcaacatagtgagaccctttgagtgacactctacaaaaaaaatggaaagattagctgggcatggtggcccgtgcctgtagtctcagctactgaggcaggtttgcttgctgcggtgagccaagtttgtgccattgcactctagcttgggcgacagagcgagaccctggctcaaaaaaaaaaaaaaaaaaaaaagaacgagtacagatcgttgctccattttaaaacaacagcctgttttgtgcagatcagcttcatagtaagatgtggtatttgtggacctaggtctgtgtgatatttttctttcttcttttcctgaaagtctttataattcaaatatagaattagattcttcaagtgttttttttgttttttgttttttttaaatctgtagaattctagcaaattggttaaaagtcaagttcatgggagatgaaggctcagtggatgacacatccagcgatgctggtgggattcagacgctttcgcttttcaactcacttagcagcaaaggggatcagatgatttctgttaacgtgtgtataaaggtgaactataattactttgtgtttacttctgtgttttcattactttcacttactcccagatatcactggaaccatgcaaatactgcttattccctaatgtggttttgaaagactgggaggctcagaagcaagtattatgtctgtccgtacatgtcgtttaaaaaatttttttaagccagtcaaattgagtagtgggcaccaagcccagcctgcttctttactttttctgttttaatactatatattggatttcctaaatgtaatatgtacacaaaacttttaaaaaatgaggaaatgtaaaagaagtataaagatgatgataagagccatccatgctcttgccattctgaggtaacagtaacttcttggtgcaaattcttcccttttcctgggattacaaagtcacatttcatctactggaaattagtttactgctgctgttaccttcattttcatttaagaaagtaacacttccgtgtacttaaaaagaagtcaaataatgccacccacgtgatttaaaatgagacatagtagctcctccttcctctcttaactcctttcttcagggctgcatttttctcctgtttccagatcacacacttacacagccatttctcagtttatccatttaaatgttctctgctgacttcccattaatataaatgtattagttaccttattcctaaataactaattactcctaacatagcagcttaaaataatgtctgttatcatggtatctgtgggtcaggaatccaggtgtagcttagcttgggtcttctggctcaaggtttctcatgggtggaaatcaaaatgttggctaggattgtggcctcatctgaaagcttgactgaagggtatctacttcccagctcactctagtgagcttgtgtcaggattcacttccttgcaggctgtggccaaagacttcctcagttcctgccacatgggcctctccccagctgacagcatggcagctggctttcatcagagtgagcaagaggtgagcctagatggaagtctgagtgtgtttataacctaaacttagaagtgacatcctgttgcttttgttggcttctgtctgtcagaagtgagtggctaggcccagctcacggggcaggagatcacacgtgggcatgaacactaggtggaatcaggggggtcctcttggccactgcataccatactaggtacagcgtggcctcttgtgccatggtccttgctcggccttccacgtcttcccgggatagctacactagcactttgtattacttcagtgagtggggtcatattttgatggctctgtgactgctattcacctcagaaccagtagtgttctataaccacaattatttttttcctgcaagaaatagagttgccttattgtctcacttaatgtagttctctttatctctttaattttactggggggccgtatatatctcggtagagttttccaaatgttctgtcacttcacttgatccatccatgttccctctgtcctggaactctcatctgtgggctggtctccatccaggcaacatgtgccttagtgccatcattgtgagcatatgtgtccctgctcctccacttggaagctctgtgaccttgggcaagttccctagcgtctctgccacctgtgtatgggtactgttacttattatccctattttactcagagacggtaaaataaactgcccaagcctctgcaggtgctgtctggtggagatgctcatctggctcttgaggataaaatgagtgcaaacacagactgcacaggacagtgcctggcacaggccaggtgcttgctcagtgttgccattagcagcagctgcagtattttttcttggttcagccccttgttggatgttatatgtcatgcgaggggaattttctgagtcttttccattatgaaaatgattttattaacaaaataccttaagctgggggaaagaaaaagaaaatgcatttatttcattctgacatttgcttcatagtttagctacgtttgtaaaattataggtagaaaattattttcctggccgcgcatagtggcttatgcctgtaatcccagcactttgggaggccgaagtgagcggattgttttgagtgcaggagttcgagaccagcctgggcaacgcggtgaaaccctgtctctataaaaaatacaaaaattagctgggcatggtggtgtgtgcctgtagttctagtagcttgggaagctgaggtgggaagattgcttgaacctgggagttcgaggctgcagtgagccgtgatcgcaccactgcactccggtgttgacagaggaagaccccgtctcaaaagaaagaaaattatttgccttccagttttgctccactgtcacctagcatccattgttgctgtaccattcctgttcctttctgtgtggcctggttttctctgtggaagccttttctctctgttcatggcgtcctaaaaattcactttgttacactggcactggactagcttcactcactgtgcagggcttagcaggtcctttcaggctagagactcctatttcacttctgggacattttcatgtctttatgacactctgtcttttttctgttctctcttgaacttctattagatagatgttaggcctcatcaattgatcctctgagtttcttatcctattttctatcctattttcaatctcatctcttcctactgtgttctgaaagagttccttgactttattttccaattgtcctactgaattttttattccatatatattacttatttcctctttctttttatcatgactttttcatagcatcttattttttggatgcatcatcttatctttccaaggaaattagggtttttggggtctaagttttctttggttcacgtattatctggttcctcttttttttttttttcctctctgttactccagtttatctcttttatgttggaggccctcctcagatgccttacccaaggctatctgtctatatctgagtgaggccctaaaaggctagccaagaagttctgtgtttggggtggggtggatggtagctaaatggcaagccaggctttttggagggactcccaaatgtctggatctggatggctgttccctagactgttcagtttttctggaaaggacttgtgccatctgctttctggggagctgctggtattctcagggtagggttgggagtggtttggcgctgagtcccttccactgtgcctgaccatggccctgcatctggatcctctcaggactcctgttcaggggcccagggggactggttttgcatagaggttgcctgcagtggtgggtgccgccaatagggtcaggctctgaacttcacctttggctcctggtgtctgcagcgcctgggtatacagggcttttgcaggctcagtcaacctgactccttacacacccacatctgcagcctttaggtatggcatcctctgcttccctaacccagggattggtcacacctatttgctgctttctagaaatgtatcagaatccctcatctgctgctggcttgccttccctctttctattattatgggcttatatttttgtttatttttgtagagatggggtcttgctatgttgcccaggctggtcttgaattcctggctcctggcctcaaacagttctcctgccttggcctccccaagtgctgggattacagtcatgagccactgtgcctagctttaacttttttatacctgtttaaggttaattaaagttatagtaatatggtcaaacacaattctagctggaggctaaattacctgttgacctggctgtttcttgcactaattctgttgcatttattctcatttttgtttctataaatttaaaatatgaacatgggtgggcgcggtggctcacacctgtaatcccagcactttgggaggccgaggcaggctgatcacttgaggtcaggagttcgagaccagcctggccaacatggtgaaaccctgtctccattaaaaatacaaaaattagctgggtgtggtggtgggcacctgtaatcccagctactagggagggtgaggcaggagaattgcttgaatccaggaggcagaaattgcagggagctgagatcgtgccactgcaatccagcctgggcgacagagtgagactccatctcaaaaaataaataaataaaaataaaataaaatatgaacatgccttatatctgaagggcagatatagaaattatttttctagggtgattgtcctctgaatatatgaagaaacaatgttatttgacgttttctttaaaaaggaagtctgaagctaggcatggtggctcctcgaacctgtaatctcagctactcaggaggctgaaccaggaggactgctcgagcccagcaattcaagaccagcctgggcaacataataagacccccttctcaaaaaaaaaaaaaggttgaggggagtctttgctaacaattggatttagggaaagaggggccaggaattaaaataactacaggaagtaagataactacagggtatgcccagctgtgcccttggaggcctgtctggagtacagtcagtatttagtgcacggagagctttggctgcacttgctctggggcagatcagtcactgctgatgcgtcccatggtgcatctctcctgatgatcttgatgctgttgcaggtggcccatggcgccctcagtgatggtgccattgatgctgtggagacacagaaggacctcctgggagccagtgggctcatgctgctgcttccccccaaaatgaagagtgaggacatggcagaggaggacgtgtactggctgtcggccttgctgcagctcaagcagctcctgcaggctaagcccttccagcctgcgcttcctctggtggttcttgtgcctagcccaggaggggacgccgttgagaaggaagtagaagatggtttgtgaaggaagtctcgtttatgaagcagcattgtttaataaatgggtggaggccctgggtctgaggatggtccagtagtgttggggtcaggaatcactgagacagcaacccctgtggtgactgtccactgcaggactgggtggggtcagcacagtgagatatgttagcaggtgtgctgacagcagaatgcaagtgaccttcatctatgtctgtcttaaaggtctgatgctacaggacttggtttcagctaagctgatttcagattacactgttaccgagatccctgataccattaatgatctacaaggttcaactaaggtaaggtttcatcatttttaatggtctgtcaagatattttgttttttccccttttgctgtatcttgaattgagtgtatattagcgtttgcattgtctttttcttaagagacagggttttattgtcacccagtatagtggcatgatgatagctccctgcaacctcaaactacagggctcatgcaatcttcccacttcagtctcccaagtatatgggactactgtggtgtgccactgcgcctggcagcagttgtatgttttatacagataactttctaaaaacataagcagaaatcaaaataaaagataaaatttgcccacagtcctgctatctgcaaattaaattgttcatgtaaaattttttagtgtttttgtttctatgaatttaaaatatgaacatgtcttatatctgaaggtcagatacagaagttatttttctagggtaattgtcctctgaatatatgaagaaataatgttatttgatgtttcctttaaaaaggaagtctgaagctgggcgtggtggctcctcgcacctgtagtctctgctactcggaggctgaagcaggaggactgcttgagctcaggagtttgagaccagcctggccaacatagcaagacccccttctcaaaaacaaaaaaaatagggcagggggagtctttgctaacaatttagagaaagaggtgccaggaattaaaataactataggaagtaagataaccatagggtgtgaaggcaccttggcacatagtgaagctgttagtccttccaaaaaggagaagactccatttctgtgcatggtgaaggggatgttcagggctggtttcctgagggcctgggcctttccatggggcaaccatgcaggtcacactcctcctcaggccaggtgggatctgggggctctctttagtgcccctactggacatgtctccagagccctagaaggctaaactcaactgcataggacacttctgttccccttcctaccacagttgagagcccagtactctggtattacctgctgtgggcaaccttgggggatcaagccctttcagaaagctgtttttgaaaaacagtgtgaattgttcaaccaagtctcttctttcttctcaggttttgcaagcagtgcagtggctggtttcccactgcccccattcccttgacctctgctgccagactctcattcagtacgtcgaagacgggattggccatgagtttagtggccgctttttccatgacagaagagagaggcgtctgggcggtcttgcttctcaggagcctggcgccatcattgagctgtttaacagtgtgctgcagttcctggcttctgtggtgtcctctgaacagctgtgtgacctgtcctggcctgtcactgagtttgctgaggcagggggcagccggctgcttcctcacctgcactggaatgccccagagcacctggcctggctgaagcaggctgtgctcgggttccagcttccgcagatggaccttccacccctggggggtacgtgcttgacctggggaggtctggtgggtggctgcagccaagtctcaggcttccttctcactgtagtaaccgtctggcaggtgttgggcaccagtgtgagggctgcacgtccacctccgtgtgtctccatgctgtgctcgcctgcaccttcctttggtcctttgggttcatgagccagaacaagctgggttttgtggagtgggggctgttagcctttcctgaccagcaaggcagtccatgggagttcactcagcttcaggagaaaagtgacaagtggtactgggaggaacaccaaccctgatcctgtcctgcctgcccacagggtccctgttttcagaacagacaaggggcaaagagcatggggaccatgtagccctgtccccaagccgcagccatggcactcagtgctgatttaacattctttctttgtcaaagaggccttcttctatggctctggctgtgcccctgttcctggctgaggtctttgggctgttttgacacagatccgacaggccatctggctggctcaagcccagtatggcatggggctgctccttcctatgcactcagaagggaatgagctgcttatctggcagaagttgtggcattagcacagacactcccctttgggcctcaggcgcccttctaaattgtggtgtgtggtctgtagtaggtctaactcatgctcattattgaaggaacccaaagggaagcaaaccactcagcacaagccctcggtgctctggttaggttggggttccccaaaataagctaagactgcttataccagactcatctgggtgcttgttaaaatacagatttcctaggcacaaccacaggcctgtacagtcagaacttctgggtagaacttggctagcaacactgttaagggggactgtctgcatccctcacctagaccctgggagcaagctgctcttccccctcaacaactgtggttctgctgtgtttagaaagcagacttctcaacttcacagttgccttctcctgagaaaatgttttcatgtacattttcacctgtattttggccaaacctgtaactaatgaggcactttctccccagccccctggctccccgtgtgctccatggttgtccagtacgcctcccagatccccagctcacgccagacacagcctgtcctccagtcccaggtggagaacctgctccacagaacctactgtaggtggaagagcaagagtccctccccagtccatggggcaggcccctcggtcatggagatcccatgggatgatcttatcgccttgtgtatcaaccacaagctgagagactggacgcccccccggcttcctgttacatcaggtaattagagcttgatgcaatgggatcagctcctcacgagactttcctggtccagtttctgcaaaggaagatgtttagttgatgttgctgcttttcttttgggtctctatccttcctttccttaggacttccctcttcaagtgagtgacttaaaaacattgagacaggctaggaagtttctggtagagcctgaactcacctccctgaaacaggccccctaggatggctcttagagaggattttgtggcttttgagtagtcattactggccctgccagtctcgatgtaagcttgtctggactttgagtgatgcatggaccctgggagcctatttaacccaagtgtggaagtcacataattgtgtgactttaatcaaaggtcttgcacttaaatcagtgaatttaagcacatgccacctgtcgctgtttaaatattatttgtacctgtttttgtttttttgtgtgtgttttttttttttttgagacagggttggccaggctggcctctttatctgtttttgtattgttttctcagaggcgctgagtgaagatggtcagatatgtgtgtatttttttaaaaacgatttgaaaaaatatgatgttcctttgtcgtgggaacaagccaggttgcagacgcagaaggagctacagctgagagagggacggtgaggttcatgttcagtatgtttctgttgcttgctaaactgtatttttcttgcaaagtaaatagaaattaacatcctacatgccaaatccagtccactgtgggcagactgtgacaaatcctcaaggaacagatcattcccatgcagtagaaactattctagaacaaagttaaagcatctcacttcatttatcaggcatacctgaccctgaaatcatacctaaccaggagagtacagctgacatttcatctcacttccaaatttggttccaaagcacagtacctaaaaaagttcacaagtatgctttctcccaggataaacaataacagtgaaaatctattaatgtaatttgttgccataatagaaaaataagtggtaattttagcaggcgttgaaatacgtttcttaaaatttatacctgttcctgataaaatttctttattttgggtactttctttagcttgggttaaaaaaaaaaaaagtcctaacttgataaggctacctaacataaaactaccaaaatagaaaaaaaacatgcttcttggtagaatgttaggaacagtggaatcagaaccagcctgttgtcccgactattattcactattgtcctggaaatcctgaccagtacagggatgtgggatagacaggcacaaatactgaaaggaaggagaaactgtcatttccagacagtacagttgtcagtccaagaaaagtcaagtccatagaaccattctcagttcaataaggtgatcagatagatagatccacaacatgttaaaaaaaaaaaaattctcattcacaacaataaacctgaacagaaagggcacaggatggtggaactttgctgttccttcttgttccccatagagatccttgaagtaccttctccaactccatgatactctaaaaactgttcatcttcataataggagtggagcctaatccttggtctcctcacctcctggtttcccggaatgtctttctcattaacatatgagttctcagggcctgtatgtgcaaaggaaacctgaaccattgaggttcagactaggttgttgacaggatacaatgctgtgaagatgtcagtactggtaagttctaaaattcatcaggataaacaaatatgcatcaattgctgagaaagttttaaataagactaacatggtttgcttggcctgataccaagacatacagtaaagctccagtacttaaaaccatgtggggatgccagagtagataaatggatcagaataaagagtcagaatatgtgacaaaagtgttaggccaaattattgaaattagtggggaaaagacaaacattggcatgtgtttagaaaaaaatgtcagatgccttctctctcaccatttgtaaacattacttccaaatgtatccaagagctatctataaaaaaccttgccaatactagggaagaacagaatctggaaccctagggtgggaagcaagacatgaagcagagaaactccaaaaacctagctgcctcttgagagcagaagcttccaagaggaacaggcagtctcaatgcctctgtgcataagggtccctacagtgcaggggctgccttccctctttgctccactccctgacttgatggaagcttggaagcaggcatggggccagcatgagctgttccaggagggcacatgtgtctgaggcacatgttcttacatgttaatgcacatgtgcaaatgtatctacatgctttacatgatgctgtagaaatattttctcttgaccataaacatttcaaatcatgtacttacagtttggcaataaagccttttcatccttctgcaaacaattttcccataccattgcttcacatgcaccgtaactggaagaggagcacagagtgtgctcaagaggggaggattcccagcacagaggatctgatgcgaggagcttctgctgaggagctcttggcgcagtgtttgtcgagcagtctgctgctggagaaagaagagaacaagaggtgaagcccacttccttctaattcatgtgtgtttagtctgctttatgctgtgaggggagactggttattgcttgattaatataagacagccaggatggagaagggcaggtggattattagcaacagttttagtgatgtaactatttaaaagctctttgaagacagaagcagtgccctagatagtatgtttctaactgtttatattgaagtgaatttcatttattatttattattgaaagtcagtgttaagtttttctgggaaattcatgtggttaagtctgctcagaagatggtgagtgctgaacactatggctggccacaggcaccctgcccttgggagcctgaggcattggtggatcatcccatgctgtgaatggacaggagctggggctgcccctcctctacattgcccacttccctccctcccatgcatacctttcctttgctttcatttgatggccatgtttaccattttactgagtagaatcaggaataagggaccttccacaggttgtcctctgccttccctgccctcccagccacatccagcatcctccctatatccccttcctgacgcctcttgttgctggaaacgaaccatgcagctcgtagtcagtcagcccttccctgggctgggatctcatctcccacctacccaaggacattcattcaatgagtatctctctcgtgctaccacccctccccatattaggtggtgcccatcagcagcacacagacatgaaacatgcctccctgtcttggtcccacttccctctttagccaccacttcatgtttctgccctcttaatggtaaaactcctcaaaaacgcttgtgatactcacttcttcagccttctttcccatggggatgaaggcccagggttgaacatgaccgtgaatcccagtccttggtagcatcccatacttgatcctcccctccttgctcctaggatgtccgtggtccccctcctgccctgctggttcctcctcatcccccagctgccccctggattcattctctcaacctctcctctgcatcgtctgtacctactcctcagaaatttcatccagtttcatggatttttaagtaacatcactattctgacagctccaaatttgtatctcaaacctctgaactccacacttgaacatgctactgcttccttgaaatcttcattagacacctattggatgtctggtagccactgcaaagttaacatatcccaaatccagttcccggctttcttccaaccaaccccttcctttggtggtcatctctgttgatggcggctccatccttccagctgcctagatcaggtgccttggaatcatcccctcacatcagcccattcacatatcctattggctctattgaaaatacattcagaattggaccacttgttatgacttccatggccaccacgtggctcaagccactatcatcttccttctggattattacagtaggctgcagtttagtcttggtagacctggtgggtgcctttcaagtgagttaagatggaggtcgtgtcacttgcttgcttacagcctctcagtggtttccctctttcacctgcaatcaaaggcaaactttgcaggggtggccagggccctgagtgatctgccccccatttcctctctgacctccgctccttccttgagcatggtaggcagttcacagttgggcctctgagtttgctgttccttttgcctaggactgtccagcccctccattctccccagcatccccatggctgatcttgtactcacttcagatctctactcaaatgtctgcttctgttaggccctgcttgcccatctccgaccttcttgtttccatggctctgctttgtctttctcatcttcaaaccatgtttctcttgttatgtgttccttgtctgtctctcctcactaaagtataaattgcttagggcagggcctctgttttgtttcagtgcaatattccttgtacctagaatgatgcctagcatctggaggaggcttaatgaatatgttttggaagggtgaatgaatgtgtccgattactaaaatcagtctctataatttaagtggtttgggatgagatttttttttcctttttattagatagagtctcgctctgttgcccaggctagagtgcagtggcacaatctcgactcactgcaacctccacctcccaggttcaagcagttctcctgccccagcctcccaagtagctgggactacaggtacccatcaccatgcctggctgatttttgtatttttagtagagacgcagtttcaccatgttggccaggctggtcttgaactcctgacctcaggtgatccacctgccttggcctcccaaagtgctgggattacaggcatgagccactgcacctggccaagattgtttttcttgaaaagaccggtatatggaagtagacagctctagagtatgttaggtggcagtgggatattattttgagttaattttaagctataagcagcaatccactcatttggaaaatgtcagaagaattaattatagatgcataaaaccaaagtaaattaaataagataagccaaacaagacaattacaagtaatgttaagtaacacatcgaagcagttgtttttggattaataccacctttttcattaaatataaattggaattggatttataaattaaagggaagtggtttctctaatttttttttttttttttttgagatggagttttgctcttgttgccctggctggagtgcaatggcgtgatctggctcactgcaacctccgcctcccgggttcaggcagttctcctgcctcagcctcccaagtagctgggattacaggcacgtgtcaccatgcctggctaatttttgtatttttagtagagacggggtttcaccatgttgatcaggctgatcttgaactcctgacctcaggtgatctgcccgcctcggcctcccaaagtgttgggattacaggcatgagccaccgagcccagcctagtttttttttttaaattaagctttatcataggaagttgttaaatttttaataagtacatttctgcttctcagttgatgtcataacttagttatattcttagtaaaaagcaaaggcttaaggctgggtgtggtgactcatgcctataatcccagcactttgggaggctgaggtgtgcacatcacttgagttcaggagttgtagactagcctgacaatacagcaaaatcccgtttctacaaaaaaatacaaaaattagctgggtggcatgcgcctctagtcccaggtatttgggaggctgaggtgagatcatttgagcttgggaggtcaaggttgcagtgagccaagattgtaacactgcactccggcctggccaacagagcgagaccttgtcaaaaaaaaataataataaaattggccaagcacagtggctcactcctgtaatcccagcactttgggaggccgaggtgggtggatcacctgaggtcaggagttcaagaccagcttgggcaatatggtgaaaccccatctctactaaaagtacaaaaaattagctgggcacagtggcacttgcctataatcccagctactcaggaggctgacgcaggagaatcacttgaacctgggaggcagaggttgcactgacccgagattatgccactgcactccagcctgggcaacagagtgagactctgtctcaaaaaaaaaaaaaaaaaaaattatataaaattttaaaaaagcaaaggcttaaaaagtttttaagtatatatagaagattaatgaacaatagttaacttcctaatgctcaaatatttttgaatttattacatattgtttcaggtttgaagatcagcttcagcaatggttgtctgaagactcaggagcatttacggatttaacttcccttcccctctatcttcctcagactctagtgtctctttctcacactattgaacctgtgatgaaaacatctgtaactactagcccacaggtgagaagaacgtatacatttggcatttacataagaattaaagattgagagaatggctggggaaaaaagtaatatcacgatttatcctatgatgttttgatgaccgacaaattattagctcaaattagaccttttcttaaactttatccatatcattgttaaagagacccaactgattttgagtttctgcctacgaaataaatgaagaatagaattgaaatattcttaagaactgaataagacctgtaactgtgtgctgatgtgtaattaagggcattaaggtgatgacagcagcttctgttggagcacatattgtctgagctttggcattacccagacctctcttctgggattaatttttcctgaggaaaactaatgaatgaggaaggtaagctcccagaagtcaagagcctcacccaagagtgttcaagtagtgagtggtcaggttgcttttcaaagccagatccaactggctccaaagcctaaggtctttttaccttaccattcttccttcagtggttaaagatgcaaaaacagagtttcaatcacagatatgtgccactgaacaggtaaaaactgtgctcctggactggctttaggaagtccttcaatagaggagaaaagcaaattaaaatgatgtactgtttccattcatcagtttggcaaatactttaaaaatattcataccctttgaattaccaattctaacctaaagaattctgacctaccagatattccccaaaaattaatgtataaaaatgtttactgtagcattattgtatgaaagtcgaaacagaataaatatccgaagatgggagtctgattaaacaattataacacattcatgtgatagaataattcacagcccttgacgatgatattttctaaaaatgactggctgggcgtggtggctcatgcctgtaatcccagcactttgggaggctgatgagggaggatcgcttaagtccaggagcttgagtccagcctgggcaacataaagagatctcatctctacagtacataattagccaggcatggtgctacatgcctgttgtcccagctactcaggaggctgagctggtaggatcacttgagcccaggagtttgaggctgcagtaagctccgatcataccactgcgttccagcctgggtgaaaaatgactgacactggaaattgttcatgatagaatacaaaggcaaacagtctatatacagataccagctgaatgtacgagctaaatgaggctggaaggatatacaaaggataatttttttccctctgtaaaaataaatgactactcagatgaggtttctaacatgatccagatctagtaccttcccagagataggtcgtggtttattgacatcccaaaactgttcagtttcttttttattcaaatagagtgacatgatgagggagcaactgcagctgtcagaggcgacaggaacgtgtctaggcgaacgactaaagcacctggaaaggctgatccggagttcaagggaagaggaagttgcctctgagctccatctctctgcgctgctagacatggtggacatttgagcagcctgacctgtggggagggggtctctcccgaagagtttctgtttttactcaaaataatgttattctcagatgcttgatgcactgttggaaatgtgattaatttaatcatgcagataaaccatttaaatgtcagtctcccagtttttcataatgaaaagttgtttcccctgtgtgacctcttcaatattctcctatattcatgacctcctcagattgtcacccaccagcatatgctctgaggcagtttagagcttacatttccatgtataaaaggcgattcattctctcagcaaacttgcagtccttgatgtgccagacatcagtgatgcagagataaagtaagacacagggcctctgcctgctaagcccacccagcttacatccaggagagtcaggtacttatgtacataattctcagagaatgtgcatgaggcgtgggcctgaattggtagcaaggaaaaaacagaggatggaacagggtctggttgggtagaggagaaacagaattcccggagaggagtgcaggggtgtagctggagacagtgtacttgagaggacatgatgaaagcgtggaggtaccagcttggttgtgtggccaggtgaggggaacaggccagcagggtgaggtcagagattcttgtcaccttcttctgagagctgtgagaacccgttgttgaagattaggcagagaagtgatctggtcacattttcttttaagaatggcatgtagggcaggaatcttgagaggtgggtgctgcagccatccaggtgaaattcaaagggaataagcctgagtttgttagcaattggtgtgaagagaggggataaaatttgagccatatacagaaagaggtattaatagacttggtgatgttgcgtatgaccaccaatcttaaactggcactcagcatctcctgactgtaatcctacatccccagactctatttcatgtcttctcattctcttcaaacctccaacattcttagatcatgtcctccttatttcactgagaaaacaacagcactaagaagagaacctcttcctccaccaaatcaatccctgcttctccaaacacacactactcaactcagggatctttagtgattagcttcatgtaaagacttaaataatgctatttcttaatcttgacttgacattgttgacttcctacaatggaagaggagttagcttctcttacactgtctttcccacaacatattatcacccccaccctcgacacccacatttcctctcctattagtctccctaagcagtttgatattggctgaaacctgcattcacagtttagtataactgtatgtttaccatttcctgttgagccctttattggtttatgattacatttcctttaggtacaacttttgatttttcctggagttaattacattgtttttctcatttgcttggttttctatgctcttgtcactactttacccaaaagtcgctgccctaaatgtaaagctcttcccaacaaagtcatgtgcatcaggtaatatgctccactttctcttcgagatgttcctgagaaccccctgtcttcttgccataacttggacatttcctggattctgaatcatattttcctcttgcttggttttctcttcttgatggagcctgtcctttagtagcctcctgagcttgaatatctaaaatgtctttatttctactgtaatattatcaaatatatatctggtctttgtctctgccttctgatatacaactcctaaaatccttgagatctctaaagtgatgtctttttgtatgctagtaagatgactgatggcggacagctcctatgtagcttcaggatagggactggacatctgaaagaccagggcatgattagaggggttgaaactttcagcccaccccccaaactcccagaggttgggggagagggactgaaagtgacgttgatcgccagtggccaatgatttaatcaatcatgcctatgtaatgagggctcctaaaaacccaaaaggacagggttcagagagcttgtggatagccaaatgtgtgggggcttccaggaaggtggacaagaacacgtccacatgctgagagaatggcacttcgcaactccttgcagacagaagctcctgctcttgggactcttctaggcttcatcctgtgtatcttttcatctggctatttgtagcctttaaaatagccttgtaataaacatgtgtttccctgagttctgtgaactgctcttgtaaattaaagccaaggaaggggtcttgggaacccagaaggacaggtaaaacaacctggggcttgtgattgacactggacatggggctcagtcttgcggcacagagtcctcaacttgtgtgatctgctgctatctccaggtagacggtgcaggattgaagcggatacccagctggtgtctgctgtacagctgaatgcttgcttgtcggtggggagaaattctctacatctggtgccaaaaggatgttgtgagagtaaagaaatggtttttttttgttttttggacttatctatccttacgtttgattcatcatttgaatgagaatagaattttagattggaaatcgttcctttgtgtttttgctttttttgttgctggaaatttttgagatcatctctattcctggtgttctcaaatttctcaatgacattacttcatatgttgcctccccattccctccccaacccctgcccaatttattgtgctgggcactttgtagtccttttttctagtttttttgttgctattgaacaaattaccccaaatatagtagcttaaatttgaggaggattcagctgggcagctttctgttgggatctctcatgcagctgcagtcaggtattggctgaggttatagtcatctgaaggcttgactgggtcagtggtccaagatggatcacttgcatggctggaggtaatgttgcactgttttccccaaatgtctggctcatgctgatgatggtgcttgttggaaactgtcaatgggtacagtctgccagctaataggtttgtttttctactaggtcatagttgccagtgtttgcaggactcttgtgggccagctgctccagagggatcctcccactatctcatgctatctggctaagtgggagaagtgagcctggacccacatgtgtagactttaactcaatctgtctgctttcagtggtcctcagctatgcctcatgcctgaggtaacacctactctgattcaactactggagacttcctccacccaagtaggagaggggatctatggtcatactgttcctcacaaaaattttccaccagttattccaatttctgcaccttcctggtatttgctggcaggaatggtctcttgttggcttcacccacaaacgtaagtctcaactttctctagctaactcagttatcacttctccatccattcccagtctctataattttgttgacttctcttgcttactagtgtctcctctcccattctttgtggggtttttttggtcttttattactttatgtgagtagggtttgggcaggaaatggaggttaatgtttatgctcagtctgccatgtttaactgaaaatttctttcaaaattctgccattaggcttttccccccatgtctctttagatagctcttgtcagtcaccaatacattgttttgttgcatccaataataaattctgtcttcattttgcaatcccttcaaagcctcagcaaagatcaccatgtcttcacttatattatgacttcatattcctctggttttcctcctctctctggccattcctctatactggaaaaggtcggtgccccagggctcattctagaacttctcttttttatgtgcatttcctaattcatcttgtccaatctcatgatttcaaatactacctgaaagcaaatgactcccaaattcctatctctagcattatgttctctcctgaatgccagcctactcaatatttcacttgaatgtctaataagcatctctagtataacttgtccccactttaatctgaattttccaatcaaactttccctattttaggccaggtgtggtggctcatgcctataatcccaacactttgggaggctgaagtgggaggattccttgtggccaggagtttgagaccatcctgggcaacatagcgagaccccgtgtctctaccaaactttaaaaaaatcagccaggtgtggtggcacacgcctgtagtcccagctattcaggaggctgagcccggaagatcacttagccctggaatttgaggctgcagtgagctaatgattgtgccactgcattcccacctgggtgacagactgagatcctgtcactaaataaataaaagacacctctattttagtaaatgaccaccaccatatacccagttgttgaggccaaaatcctcagagccttctgtatctggcttaatgaataagctggatgcagtagtatgtaagcagataggaacagtgttttttctcatgactgcccctagaagcttaactgtgtcaattctcagacgtagtttacagctttttcttttctttcagacattaaaaagagcggattattttactcataaaaagtccagtccattaagatatcaaaactcaaactcttatccagttgaaacctcttccctcacctagctttgccaggttcagtgtgagattccatccaggctgaagccccttatccctattcttcatgtttctacatggaggaacttacctggagaaaaacttccagcctctttctgcttccagagaagtagagtgactcatttgattgaatttcagagaacagatagggtggagtgtgctcaggctcctctgggtactctttctggggtctgtgggttgactggaggggtgtcttctggtgggcactcaattgcatagtgcttggtgaggcagtttcatggcctagaggctgggggatatgtttgtctgacttacgggtgatttagtagcttgccctcttgcttgcagatttaagccttgtccttcaagctaggtttttaatttgtggcaaagctgatattttgatacccacccatcttattgctgtgtctttttcatccgtttctgaactgggataggaagaggtgattatccttgattgtctaaaaccccgctattccactgtggggaaggtgcctgtgggtattcttttgtccactctctcttccaactttctcctccggcttgctgtggctcaccgccccttcgaagttaggctgggggtaggaattgaggagtgggtgccgaaatgctcactaggctggggcagttgtaactggatgtcagggcttctgtgggccaggtgaagacatgctggggtcttctgtgggtccttgacctgacttacggaccactggctgcagcctccagacgtcagccatgtttccaacagtcagacgccccctgccctgttgcgcccggctgtcccttccaagttcggtcactcgctctgcctccatcttcctcttccctctgctgctaaggcttttcacctttaatttctcctggggccacccccaactccagcgaccccgtgagcagctgaggctctaccgcgctcggtcctggccagcgacgcagcccttccctggcggggctccagggcttctggcccctgtggtccgccaggtgtgggggcccacggcctcaccgcgcctaccccactccccccggcgaagctacgcggcgctcagcttcccagggacgccggcggcgccctcggctcctccgctccgccccgccctccccctggtctcgcactggagccgacggcccgcgcccacctcacctcagggcggcctcccgcccccacccccggccccggcgtccgggcaaatcctgcagcgcgagagcaattccctgccacccgaccttcgcactcgctgtcgctcgctcgagcctcgctccccacgtccttccttccgacccgcggctggaccctcctcacaaatttctcagagaggctcacctcaaagcgcggcgcacgaggccgggctcccgggacgcaagcctctagagggcgcgcgagaggccccgcccccgcccttcggccccacccaccagccccgcccccacccgcacccaccaggccccgcccccacctccccacccaccagccccgcccccacctccccacccaccagccccgcccctcatgccccgccaataaggccccacccgcctcccccgtcccgtcgccttcacccaccatccccgctccctcaggccccgccccacgccgcatggggcaccaagcgctccaccactgtggtcgcctggcacaccccggggtcacgctcgcggcgctctgattggttgcgtgggcgtcggcccacctaagcctgagcgcctgccgaggcctgcgcctgcgtagtgcgcgcgggaggggcgggaggggcgggaggggcgggaggggcggggctgggcggcaggtcccgggtgcggacatctggcagctggcagtgggcggcgtagagcactgcagcagcaatgacggagggcacgtgagtcccctcgccccgggctcctgacgaatgcggggtggtcctaggtgctgaggagagcgcgactggggcagtgggccggcggccggcgttggggcggggcctgggtcgctgatggccggtggtcctcaggtgtctgcggcgccgagggggcccctacaagaccgagcccgccaccgacctcggccgctggcgactcaactgcgagaggggccggcagacgtggacctacctgcaggacgagcgcgccggccgcgagcagaccggcctggaagcctacgccctggggctggacaccgtaagttgcttccgcggagcgtcagcgagctcgggaccctgaggggtgagccgtgaggagcacgttttctctcagaaaggcgggtgggaggacccggccagcgacgcccatccccaaggcgagcgcccacgggaactgcgttcgcgggcccctccgcttcagccccttcatctctaaaccacgcataggagactcctaatgttttattttttagcaccttattttgagataatttttgacttataggagagttgcaaagatagttgtaactttgtttttattcacaaaaagtgtttggatccactgtcttagttgtgtgcattgtaagagattttggtcgtcagagtctgcagtgtaaacagggtctcctgccgagccccggccaccgagggaaaggctgtgccgccccttgggccctctttgagaggcccgagtcccaggcccaggtcggcacccgtgccccaccctacagtctgggtgcctggtttattccagacatcttggagaagttgtgaagaatacatgactggcaaataaagcaacgaaaatgtgcagctgttcttttactttgctgaggtgtgatgctctcatcaaagagtttcagacttttgatggaaacagctgaaacttttaaagtaatttacattcactgttttgacttgggctgtatgtgaagagggttcctctggccgggcaacagtcccgtcagctatctctttttttttttttcgatctctttgcagaagaattactttaaggacttgcccaaagcccacaccgcctttgagggggctctgaacgggatgacattttacgtggggctgcaggctgaggatgggcactggacgggtgattatggtggcccacttttcctcctgccaggtaggagtatgctgccccagcctgatggtatggccaccctggatcacccttgggatcctggcccagcctggtctagggttttgatgaagcaggtgaaaatccaggggctcacaagaaaagggctggcaaactctgccctatgtcagagtcgtcctgctattggtctaggggatcagctagccttgccagtgtagggtgacaggctctctgataagagaagcaagtggttctctagggctctgtgttgccttgagggaggaggaaggtgggctttgaagtctcagtacaggatgggatggacattccaggtggaaggcccagcctatgccaaggggctgtaggtgggcagagtggtgggtggggagctgatatctgctgtgaacttcctcggggctattgcaggagagcttcaggttcaggctggtgagtaggaggagcatagcagttggactgcctgggtattgaactgatttggctacacaagactattttgcatcctgggagtgtttctctacagaaatcctcagccttgtaaaatgggaaattccctcctatgaatttatgcaataggacttttttccctagtgacttgtaatcacattgtttcaatgacgtgaattcctacataaataggttttgtttctgtgataactcttactgatacatcattttcttttactacgctgactttgtaatagatagaaagtccttatatacctttgttgcctttctttttaaaacatctcttacctgtgtctattcatttactcatccaaattgcctttatcctgattttgtcccagacttgaaatgaagttgcaataggcttatatgttagtttgggaagagttggcctttaacgttaaaaacagttccatggtgtttactgtaggccaagccctgctcaaggcctgttcttcttttagtccttagaataagcctaatgagatacattagaaagctgaggcacatttattccaggtaaccagactagcaggaggagcactgggatccccatctctgctttgacttctagccctgctgccacctggactgtacagcattgagtttttctgtcctgggatttgagggcctgtccttaggggaagtcaaggtgctcttcttcccttggccccatcagggcctgtttagactgttctcagggctcgtggtaaggcaatgacatagagttggtcaggagatgggtcagccccactttgcctctgtagcctgacctgtgacaggattggaatcaggtttggtcatgtgcacagtgtcaggcatgcagtggtgcttggtcagtggggattactgtgttgtttgttcttgctgctttggctctgggcttagctggctgggacccttcctgtgggctggctgtgagttggagtttttttgtatttttttttttttttgagacagcgttcgctcttgttccccaggctggagtgcaatggcacaattttggctcgttgcagcctctgcctcctgggtgcaagtgattctcctgcctcagcctcctgtagggtccagccccacagggtcggtaggtttttctccctgtgtgcggagatgagagattgtagaaataaagacacaagacagagagatgaaagaaaagacagctgggcccgggggaccactaccaccaagacgtggaaaccggtagtggccctgaatgccaggctgcgctgatatttattggatacaagacaaaggggcagggtaaggagtgtgagccatctccaatgataggtaaggtcacatgggtcacgtgtccactggacagtgggctcttccctgcctggcagccgaggcagagagtgggagagagagagagagagacagcttatgccattatttctgcatatcagagacttttagtactttcactaattttgctactgttatctaaaaggcagagccaggtgtacagggtggaacatgaaagtggactaggagcgtgaccactgaagcacagcatcacagggagatggttaggcctccggataactgcgggtgggcctgactgatgtcaggccgtccacaagaggtggaggagtagagtcttctctaaactcccccggggaaagggagattccctttcccggtatgctaagtagcgggtgtttttccttgacactgacgctaccgctagaccacggttgggtccgcttggcaacgggcctcttcccagatgctggcgttaccgctagaccaaggagccctctagtggccttgtccgggcttaacagaaggctctcactcttgtcttctggtcactt

SEQ ID NO: 173 - DNA, 6114 bp, Homo sapiens
gtaatacttaattaccttctaataattggagcagaagatgaacccaactaatcctttcagtgggcagcagcctagtgctttttcggcgtcttctagtaatgtaggaacacttccatctaagccgccatttcgatttggtcaaccttctctttttggacaaaacagtaccttatctgggaagagctcgggattttcacaggtatccagctttccagcgtcttctggagtaagtcattcctcttcagtgcaaacattagggttcacccaaacctcaagtgttggacccttttctggacttgagcacacttccacctttgtggctacctctgggccttcaagttcatctgtgctgggaaacacaggatttagttttaaatcacccaccagtgttggggctttcccaagcacttctgcttttggacaagaagctggagaaatagtgaactctggttttgggaaaacagaattcagctttaaacctctggaaaatgcagtgttcaaaccaatactgggggctgaatctgagccagagaaaacccagagccaaattgcttctgggttttttacattttcccacccaattagtagtgcacctggaggcctggcccctttctcttttcctcaagtaacaagtagttcagctaccacttcaaattttaccttttcaaaacctgttagtagtaataattcattatctgcctttacccctgctttgtcaaaccaaaatgtagaggaagagaagagaggacctaagtcaatatttggaagttctaataatagcttcagtagcttccctgtatcatctgcggttttgggcgaacctttccaggctagcaaagcaggtgtcaggcaggggtgtgaagaagctgtttcccaggtggaaccacttcccagcctaatgaaaggactgaaaaggaaggaggaccaggatcgctccccaaggagacatggccacgagccagcagaagattcggatcctctgtcccggggcgatcatcctccagacaaacgacctgtccgcctgaatcgaccccggggaggtactttatttggtcggacgatacaggatgttttcaaaagcaataaggaagtaggtcgtctgggcaacaaggaggccaaaaaggaaactggctttgttgagtctgcagaaagtgaccacatggctatcccaggagggaatcagtctgtcctggcaccttcccggattccaggtgtgaataaagaggaagaaactgaaagtagagagaagaaagaagattctctaagaggaactccggcgcgtcagagtaacagaagcgagagcacagacagtcttgggggcttgtctccctctgaagtcacagccatccagtgcaagaacatccctgactacctcaacgacaggaccattctggagaaccattttggcaaaattgctaaagtgcagcgcatctttaccaggcgcagcaaaaagcttgcagtggtacatttctttgatcatgcatctgcagccctggctagaaagaaggggaaaagtttgcataaagacatggctatcttttggcacaggaagaaaataagccccaataagaaacccttttccctgaaggagaagaaaccaggtgacggtgaagtcagcccgagcacagaggatgcaccctttcagcactctcctcttggcaaggccgcagggaggactggtgctagcagcctcctgaataaaagctctccagtgaagaagccaagtcttctaaaggcccaccaattcgagggagactcttttgactcagcctccgagggctccgagggcctcgggccatgtgtgctctccctcagtaccctgataggcactgtggctgagacatccaaggagaagtaccgcctgcttgaccagagagacaggatcatgcggcaagctcgggtgaagagaaccgatctggacaaagcgaggacttttgttggcacctgcctggatatgtgtcctgagaaggagaggtacatgcgggagacccgtagccagctgagcgtgttcgaagtggtcccagggactgaccaggtggaccacgcagcagctgtgaaagagtacagtcggtcctcggcggatcaggaggagcccctgccccacgagctgcggcccttgccagtgctcagcaggaccatggactacctggtgacccagatcatggaccagaaggagggcagcctgcgggattggtatgacttcgtgtggaaccgcacgcgtggcatacggaaggatatcacgcagcagcacctctgtgaccccctgacggtgtccctgattgagaagtgcacccggtttcacatccactgtgcccacttcatgtgtgaggagcccatgtcctcctttgatgccaagatcaataatgagaacatgaccaagtgcctgcagagcctgaaggagatgtaccaggacctgagaaacaagggtgtcttctgtgccagcgaagcggagttccagggctacaatgttctgctcagtctcaacaagggagacatcctaagagaagtacaacagttccatcctgctgttagaaactcatctgaggtgaaatttgctgttcaggcttttgctgcattgaacagtaataattttgtgagatttttcaaactggtccagtcagcttcttacctgaacgcttgtcttttacactgttacttcagtcagatccgcaaggatgctctccgggcgctcaactttgcgtacacggtgagcacacagcgatctaccatctttcccctggatggtgtggtgcgcatgctgctgttcagagactgtgaagaggccaccgacttcctcacctgccacggcctcaccgtttccgacggctgtgtggagctgaaccggtctgcattcctggaaccagagggattatccaagaccaggaagtcggtgtttattactaggaagctgacggtgtcagtcggggaaattgtgaacggagggccattgccccccgtccctcgtcacacccctgtgtgcagcttcaactcccagaacaagtacatcggggagagcctggccgcggagctgcccgtcagcacccagagacccggctccgacacagtgggcggagggagaggagaggagtgtggtgtagagccggatgcacccctgtccagtctcccacagtctctaccagcccctgcgccctcaccagtgcctctgcctcctgtcctggcactgaccccgtctgtggcgcccagcctcttccagctgtctgtgcagcctgaaccaccgcctccagagcccgtgcccatgtactctgacgaggacctggcgcaggtggtggacgagctcatccaggaggccctgcagagggactgtgaggaagttggctctgcgggtgctgcctacgcagctgccgccctgggtgtttctaatgctgctatggaggatttgttaacagctgcaaccacgggcattttgaggcacattgcagctgaagaagtgtctaaggaaagagagcgaagggagcaggagaggcagcgggctgaagaggaaaggttgaaacaagagagagagctggtgttaagtgagctgagccagggcctggccgtggagctgatggaacgcgtgatgatggagtttgtgagggaaacctgctcccaggagttgaagaatgcagtagagacagaccagagggtccgtgtggcccgttgctgtgaggatgtctgtgcccacttagtggacttgtttctcgtggaggaaatcttccagactgcaaaggagaccctccaggagcttcagtgcttctgcaagtatctacagcggtggagggaagctgtcacagcccgcaagaaactgaggcgccaaatgcgggctttccctgctgcgccctgctgcgtggacgtgagcgaccggctgagggcgctggcgcccagcgcagagtgccccattgctgaagagaacctggccaggggcctcctggacctgggccatgcagggagattgggcatctcttgcaccaggttaaggcggctcagaaacaagacagctcaccagatgaaggttcagcacttctaccagcagctgctgagtgatgtggcatgggcgtctctggacctgccatccctcgtggctgagcacctccctgggaggcaggagcatgtgttttggaagctggtgctggtgttgccggatgtagaggagcagtccccagagagttgtggcagaattctagcaaattggttaaaagtcaagttcatgggagatgaaggctcagtggatgacacatccagcgatgctggtgggattcagacgctttcgcttttcaactcacttagcagcaaaggggatcagatgatttctgttaacgtgtgtataaaggtggcccatggcgccctcagtgatggtgccattgatgctgtggagacacagaaggacctcctgggagccagtgggctcatgctgctgcttccccccaaaatgaagagtgaggacatggcagaggaggacgtgtactggctgtcggccttgctgcagctcaagcagctcctgcaggctaagcccttccagcctgcgcttcctctggtggttcttgtgcctagcccaggaggggacgccgttgagaaggaagtagaagatggtctgatgctacaggacttggtttcagctaagctgatttcagattacactgttaccgagatccctgataccattaatgatctacaaggttcaactaaggttttgcaagcagtgcagtggctggtttcccactgcccccattcccttgacctctgctgccagactctcattcagtacgtcgaagacgggattggccatgagtttagtggccgctttttccatgacagaagagagaggcgtctgggcggtcttgcttctcaggagcctggcgccatcattgagctgtttaacagtgtgctgcagttcctggcttctgtggtgtcctctgaacagctgtgtgacctgtcctggcctgtcactgagtttgctgaggcagggggcagccggctgcttcctcacctgcactggaatgccccagagcacctggcctggctgaagcaggctgtgctcgggttccagcttccgcagatggaccttccacccctgggggccccctggctccccgtgtgctccatggttgtccagtacgcctcccagatccccagctcacgccagacacagcctgtcctccagtcccaggtggagaacctgctccacagaacctactgtaggtggaagagcaagagtccctccccagtccatggggcaggcccctcggtcatggagatcccatgggatgatcttatcgccttgtgtatcaaccacaagctgagagactggacgcccccccggcttcctgttacatcagaggcgctgagtgaagatggtcagatatgtgtgtatttttttaaaaacgatttgaaaaaatatgatgttcctttgtcgtgggaacaagccaggttgcagacgcagaaggagctacagctgagagagggacgtttggcaataaagccttttcatccttctgcaaacaattttcccataccattgcttcacatgcaccgtaactggaagaggagcacagagtgtgctcaagaggggaggattcccagcacagaggatctgatgcgaggagcttctgctgaggagctcttggcgcagtgtttgtcgagcagtctgctgctggagaaagaagagaacaagaggtttgaagatcagcttcagcaatggttgtctgaagactcaggagcatttacggatttaacttcccttcccctctatcttcctcagactctagtgtctctttctcacactattgaacctgtgatgaaaacatctgtaactactagcccacagagtgacatgatgagggagcaactgcagctgtcagaggcgacaggaacgtgtctaggcgaacgactaaagcacctggaaaggctgatccggagttcaagggaagaggaagttgcctctgagctccatctctctgcgctgctagacatggtggacatttgagcagcctgacctgtggggagggggtctctcccgaagagtttctgtttttactcaaaataatgttattctcagatgcttgatgcactgttggaaatgtgattaatttaatcatgcagataaaccatttaaatgtc

SEQ ID NO: 174 - DNA, 5943 bp, Homo sapiens
atgaacccaactaatcctttcagtgggcagcagcctagtgctttttcggcgtcttctagtaatgtaggaacacttccatctaagccgccatttcgatttggtcaaccttctctttttggacaaaacagtaccttatctgggaagagctcgggattttcacaggtatccagctttccagcgtcttctggagtaagtcattcctcttcagtgcaaacattagggttcacccaaacctcaagtgttggacccttttctggacttgagcacacttccacctttgtggctacctctgggccttcaagttcatctgtgctgggaaacacaggatttagttttaaatcacccaccagtgttggggctttcccaagcacttctgcttttggacaagaagctggagaaatagtgaactctggttttgggaaaacagaattcagctttaaacctctggaaaatgcagtgttcaaaccaatactgggggctgaatctgagccagagaaaacccagagccaaattgcttctgggttttttacattttcccacccaattagtagtgcacctggaggcctggcccctttctcttttcctcaagtaacaagtagttcagctaccacttcaaattttaccttttcaaaacctgttagtagtaataattcattatctgcctttacccctgctttgtcaaaccaaaatgtagaggaagagaagagaggacctaagtcaatatttggaagttctaataatagcttcagtagcttccctgtatcatctgcggttttgggcgaacctttccaggctagcaaagcaggtgtcaggcaggggtgtgaagaagctgtttcccaggtggaaccacttcccagcctaatgaaaggactgaaaaggaaggaggaccaggatcgctccccaaggagacatggccacgagccagcagaagattcggatcctctgtcccggggcgatcatcctccagacaaacgacctgtccgcctgaatcgaccccggggaggtactttatttggtcggacgatacaggatgttttcaaaagcaataaggaagtaggtcgtctgggcaacaaggaggccaaaaaggaaactggctttgttgagtctgcagaaagtgaccacatggctatcccaggagggaatcagtctgtcctggcaccttcccggattccaggtgtgaataaagaggaagaaactgaaagtagagagaagaaagaagattctctaagaggaactccggcgcgtcagagtaacagaagcgagagcacagacagtcttgggggcttgtctccctctgaagtcacagccatccagtgcaagaacatccctgactacctcaacgacaggaccattctggagaaccattttggcaaaattgctaaagtgcagcgcatctttaccaggcgcagcaaaaagcttgcagtggtacatttctttgatcatgcatctgcagccctggctagaaagaaggggaaaagtttgcataaagacatggctatcttttggcacaggaagaaaataagccccaataagaaacccttttccctgaaggagaagaaaccaggtgacggtgaagtcagcccgagcacagaggatgcaccctttcagcactctcctcttggcaaggccgcagggaggactggtgctagcagcctcctgaataaaagctctccagtgaagaagccaagtcttctaaaggcccaccaattcgagggagactcttttgactcagcctccgagggctccgagggcctcgggccatgtgtgctctccctcagtaccctgataggcactgtggctgagacatccaaggagaagtaccgcctgcttgaccagagagacaggatcatgcggcaagctcgggtgaagagaaccgatctggacaaagcgaggacttttgttggcacctgcctggatatgtgtcctgagaaggagaggtacatgcgggagacccgtagccagctgagcgtgttcgaagtggtcccagggactgaccaggtggaccacgcagcagctgtgaaagagtacagtcggtcctcggcggatcaggaggagcccctgccccacgagctgcggcccttgccagtgctcagcaggaccatggactacctggtgacccagatcatggaccagaaggagggcagcctgcgggattggtatgacttcgtgtggaaccgcacgcgtggcatacggaaggatatcacgcagcagcacctctgtgaccccctgacggtgtccctgattgagaagtgcacccggtttcacatccactgtgcccacttcatgtgtgaggagcccatgtcctcctttgatgccaagatcaataatgagaacatgaccaagtgcctgcagagcctgaaggagatgtaccaggacctgagaaacaagggtgtcttctgtgccagcgaagcggagttccagggctacaatgttctgctcagtctcaacaagggagacatcctaagagaagtacaacagttccatcctgctgttagaaactcatctgaggtgaaatttgctgttcaggcttttgctgcattgaacagtaataattttgtgagatttttcaaactggtccagtcagcttcttacctgaacgcttgtcttttacactgttacttcagtcagatccgcaaggatgctctccgggcgctcaactttgcgtacacggtgagcacacagcgatctaccatctttcccctggatggtgtggtgcgcatgctgctgttcagagactgtgaagaggccaccgacttcctcacctgccacggcctcaccgtttccgacggctgtgtggagctgaaccggtctgcattcctggaaccagagggattatccaagaccaggaagtcggtgtttattactaggaagctgacggtgtcagtcggggaaattgtgaacggagggccattgccccccgtccctcgtcacacccctgtgtgcagcttcaactcccagaacaagtacatcggggagagcctggccgcggagctgcccgtcagcacccagagacccggctccgacacagtgggcggagggagaggagaggagtgtggtgtagagccggatgcacccctgtccagtctcccacagtctctaccagcccctgcgccctcaccagtgcctctgcctcctgtcctggcactgaccccgtctgtggcgcccagcctcttccagctgtctgtgcagcctgaaccaccgcctccagagcccgtgcccatgtactctgacgaggacctggcgcaggtggtggacgagctcatccaggaggccctgcagagggactgtgaggaagttggctctgcgggtgctgcctacgcagctgccgccctgggtgtttctaatgctgctatggaggatttgttaacagctgcaaccacgggcattttgaggcacattgcagctgaagaagtgtctaaggaaagagagcgaagggagcaggagaggcagcgggctgaagaggaaaggttgaaacaagagagagagctggtgttaagtgagctgagccagggcctggccgtggagctgatggaacgcgtgatgatggagtttgtgagggaaacctgctcccaggagttgaagaatgcagtagagacagaccagagggtccgtgtggcccgttgctgtgaggatgtctgtgcccacttagtggacttgtttctcgtggaggaaatcttccagactgcaaaggagaccctccaggagcttcagtgcttctgcaagtatctacagcggtggagggaagctgtcacagcccgcaagaaactgaggcgccaaatgcgggctttccctgctgcgccctgctgcgtggacgtgagcgaccggctgagggcgctggcgcccagcgcagagtgccccattgctgaagagaacctggccaggggcctcctggacctgggccatgcagggagattgggcatctcttgcaccaggttaaggcggctcagaaacaagacagctcaccagatgaaggttcagcacttctaccagcagctgctgagtgatgtggcatgggcgtctctggacctgccatccctcgtggctgagcacctccctgggaggcaggagcatgtgttttggaagctggtgctggtgttgccggatgtagaggagcagtccccagagagttgtggcagaattctagcaaattggttaaaagtcaagttcatgggagatgaaggctcagtggatgacacatccagcgatgctggtgggattcagacgctttcgcttttcaactcacttagcagcaaaggggatcagatgatttctgttaacgtgtgtataaaggtggcccatggcgccctcagtgatggtgccattgatgctgtggagacacagaaggacctcctgggagccagtgggctcatgctgctgcttccccccaaaatgaagagtgaggacatggcagaggaggacgtgtactggctgtcggccttgctgcagctcaagcagctcctgcaggctaagcccttccagcctgcgcttcctctggtggttcttgtgcctagcccaggaggggacgccgttgagaaggaagtagaagatggtctgatgctacaggacttggtttcagctaagctgatttcagattacactgttaccgagatccctgataccattaatgatctacaaggttcaactaaggttttgcaagcagtgcagtggctggtttcccactgcccccattcccttgacctctgctgccagactctcattcagtacgtcgaagacgggattggccatgagtttagtggccgctttttccatgacagaagagagaggcgtctgggcggtcttgcttctcaggagcctggcgccatcattgagctgtttaacagtgtgctgcagttcctggcttctgtggtgtcctctgaacagctgtgtgacctgtcctggcctgtcactgagtttgctgaggcagggggcagccggctgcttcctcacctgcactggaatgccccagagcacctggcctggctgaagcaggctgtgctcgggttccagcttccgcagatggaccttccacccctgggggccccctggctccccgtgtgctccatggttgtccagtacgcctcccagatccccagctcacgccagacacagcctgtcctccagtcccaggtggagaacctgctccacagaacctactgtaggtggaagagcaagagtccctccccagtccatggggcaggcccctcggtcatggagatcccatgggatgatcttatcgccttgtgtatcaaccacaagctgagagactggacgcccccccggcttcctgttacatcagaggcgctgagtgaagatggtcagatatgtgtgtatttttttaaaaacgatttgaaaaaatatgatgttcctttgtcgtgggaacaagccaggttgcagacgcagaaggagctacagctgagagagggacgtttggcaataaagccttttcatccttctgcaaacaattttcccataccattgcttcacatgcaccgtaactggaagaggagcacagagtgtgctcaagaggggaggattcccagcacagaggatctgatgcgaggagcttctgctgaggagctcttggcgcagtgtttgtcgagcagtctgctgctggagaaagaagagaacaagaggtttgaagatcagcttcagcaatggttgtctgaagactcaggagcatttacggatttaacttcccttcccctctatcttcctcagactctagtgtctctttctcacactattgaacctgtgatgaaaacatctgtaactactagcccacagagtgacatgatgagggagcaactgcagctgtcagaggcgacaggaacgtgtctaggcgaacgactaaagcacctggaaaggctgatccggagttcaagggaagaggaagttgcctctgagctccatctctctgcgctgctagacatggtggacatttga

SEQ ID NO: 175 - DNA, 79786 bp, Mus musculus
  misc_feature (5773)..(5875): "n" at positions 5773 through 5875 can be any base.
  misc_feature (9349)..(9578): "n" at positions 9349 through 9578 can be any base.
  misc_feature (17320)..(17795): "n" at positions 17320 through 17795 can be any base.
  misc_feature (18799)..(18844): "n" at positions 18799 through 18844 can be any base.
  misc_feature (26959)..(26978): "n" at positions 26959 through 26978 can be any base.
  misc_feature (38486)..(38505): "n" at positions 38486 through 38505 can be any base.
  misc_feature (66359)..(66506): "n" at positions 66359 through 66506 can be any base.
cttctcccatttggaagagatcttctgctggaacactaaccgcccaagggaattcaatctggggagtctcaagagggagagagactgtccagactacattccataaaggcaagtatggccaggggaggccttggacaggcaaggaagggaaggtaccctagtgagcacaactctggcagacgtgggtacttgcccaggacccgtgcaggaacaacagtataaactataggaactacaagcccacagacgtggctgacccctcccatgcattttactggcagccttgagtttccaaggatcaagagaagctgagtcatccctatcttgtagtccctcctccctttcttttactaatactttcagcagtattttaaatttattttgctaatattttttggattagcttttagattatctttgtgcatttagtgatgtttacagatttttctcattactgggagatatttttcttttttttttttttcttttttcttttttttttccgagatagggtttgtctgtgtagccctggctgtcctggaactcactttgtagaccaggctggtctcgaattcagaaatccacctgcctctgcctcccaagtgctgggattaaaggcgtgcgccaccaccgcccagctgagatatttttctttttctcactctttataaagttctttctttcctcttcctcctctttttcctcctccccctcccccctcccctgccttctgctcttgtcttcttttcttttcgtttctttttttttctattatacatttagtggttattttgtctttgtcatatcgtttttaaaatccacgcttaatttttttgtcactttcttatgtttaccactttttggttttgagctttgtacggtctgtgattacaatggagctttctgggttttatcttatttttatttttcctgacgccttgctctaccctcttgccctctaaaacactctcctctcctcctccgcttattttctctcatatttatttaatcttatttcggtttttggtttgctctttgcctgcctttccccagcattcactgcttccacctttgctctaaatactttttaggttcacagtacagtacagtagttttgccattttctgttttgttttatggatattagtgatatgttattgagttttttttaaagcacgtgtcttacttctatggtttcatgttcctcgtagtgtagtagtttgttttattttctgtaagtggtattgaggcttcaaagacatgctgttcaacaataagaatccaaaataaaaccagaagaaccattcacaccatcagaaatgcaaatcacagtgaaacacaagacttcaaaggggatggatgacctcagagatggcacagacaagtaaggaattcaagtaggacctgaagaggaaaatccacagacaagaggaaacgatcagcagaaagggtgagaaagtcaacaggattgatggagaaccgaaagttagcaaggaaatggagagattgggataaagccaaacagaagcaatggaaatgacaactgcatgaaaacaaacagactgaaacgtaaagcgtaatcaatggacttaagcaagcagaggaagaacatcatggatgaatggatgccaaggcaaaggtcaggctgcatccaaatacagtaagaaaacaggatcgtggtacagtggccaagactctgggatatcatcaatggtctaaacccacgaatctgtggaatggaaaaaggaaatgagacgtaaaactaaagatataaagaatctacccaattaaattataacataactttccctccctcctaaaatctagagcaacaggcagacatccaaggaaaagccacttctcatctatcataatcaagattttggggatgcaaaggaaaggataataggaaaggtttcaggggaaatgccaaatcatcaacacgagtggttgttgttggacaagcatgtttccataccacggagacaccgcagcaacaatcctaaaacacggcgcagtatatatcatgctctgagagcacaaaacctttccgctaaggtcactccctccaccaaagctctctcttagctctgacagagaagtagacatacaagacaagcacatgacaagtttatgactagcaagtccaaaaatacaaagcaaaacagagcaaacctaaaaacacccaaggcatattacacacagaaaaggtggaaggtctcaatcatgagatcacagagaagaatacgtttactgagaggagcagaaccaaaagggctggccaggaatccggcaggaccaaggcactaaaccagcagacaactgactctaagagcagagaaggaatggagctagcaacaacacaacccaaagttacaaaaattaatacacatctgtcaatactacagattatctcggataaagagatgcaaactgaccggctgggctcaaaaagtagatccaagtatccaatgtccccaagaaacataactagcaaaacacacttacagattcagaatcagacagaggctctgagtcaatcaggcaagtgaacagaaacggaagacacgctggcatggcttttctgctgtctgatggagaagagttcaaacaaaacttactcagaagacataaaggaggccccatggcatattaataaaggaaatatttcatcaagaacaagcagcaaatataaatacacatatactgaaaatagatactctccgttttataaaacaaacactaatggacataaaagtttaggtaaatcctgacacaacaagaggaatgacttcagtgactcaatgacatatccatagaggtcatttgaaagcaaaaataaataaagagatctcatcgtcaaactgcactccaggccgggcatggtggcacacacctagcacttgggaaacagaggcaggcagagctctgagactgagaccagcctcatctataaagggagtttcaggacagccagggctacacagagaaacctgtcttgagaaaccaaaaccaaaccaaatcaaaccaaaccaaaccaaaccaaacaaacaaaacaaaataaaaccccacaaaaccacactgtagattaaatgacttctgacatatagagttcaatccaacagatactcaatatacatcaaaaggccctggaaccttctctaaaacagacctcattctacgtccactggtgttttacctcatgtctgtctgtgtgagggtgtcagaggccccccaaactggacttacagacatgtgtgagctgccatgtgggtgttgaaaattgaacccaggttctctggaagagcagccagtgctcttaaccactaagctgtctctccagcccccaagagaacaggtcttaacaaataaaagaaaatcaaagtaatttcttgtatcttattggatcttactgcagtgaaactagagatcaatagcagaagaaaccacagaaactacagaagtacctgaggctgatgactagatttaggaaggaccagtgggccattcaagaaatcgagaagaaaaattcttaaaattaagcaaaaatgaaagcacaacctattagtctctatgggatacagctaaggcagtccttaaaaggaaagtttatagctggagggcttacattaaaaacatcagtgtgatggtagatatgtgaccaagtggactgtctcaaaggctcaaaaacagaaaagagaagccaaaatccaaagcagtagacagcaagaaataataaagagctgagcagataaagaactgtaaaaacctatctatataaaaaaataataaattcctagacatgtatgatctactaaacttgaatcaggaatatataaccaccttctaaagatctataataatcaacaagattgatgcagaaatcaagtctctaacaaaggaaaactcacgactggaaggcttcactactgaattctttcaagaaaagccaaatctaaaagtcctcaaactgttccataattagaaagaaaaacaacacgaccaaactcactctgtgaaataagcatgacttttgtatctaaaatagaagatggcacaagaacaaaaaagaaaactgtaacttccatgatgaacatacatacaaaaattgtcaataaagttctttaaagcttaaagctagatcaatagctcaggcagctctgcctttagtcctattcccagaggatatagtgcttgcatcttgcctcaggcattggcacacatgtggcatgcacattcacatggatagaaataataaaaaaacacatttgtacactcttgaaaactaatttttacaaatgtacattgtgattatacactatggtcaagtttgtctcattccaggaaggcaaggttggttcaatatacacagatcagtcaagacaacgcagaatataattatcattttattagatgtagataagtcctttaacaaagttcaacatcccttcatgatgaatagcctcagagaaactcacaggagggacgtgtgtcaacatagtaaaggctacatacgaataacacacctatagccaaaagtatattaaatggaaaagactgtaattgtttcctctaaatcaggaaggagacaaatatgctacctccatgagtcctactcaatccaatgatcaaagtcttagctaagcataagacaagataaagaagtaaagtggacatgagtaggaaagaaggcacatggcctttttacagacaacatgagcctatacctaaaagacccaaagtctccaccagaaaacacctagacccgataaatactttcatacaaagttgagtagcttttctacatgccaatactgaattttccaagggtattaaatcaagggggaaagtcctaatcacaatggcttaaaaaacgaaataaatttacaaataaacctaaccacccaaccgaggagattaaagactaaataaagactttaatactttaaagaagttgaagaatacaccagaagatgaaaagatctctcacatgctcatggattggcagaagtcagtcgggagaaaatggttccattactacaagctatatagaaatgcagtgcaattcccatcagaattctgattggcattctttacagaactagaaaaaacaactctaaaattcccacagacgcacaaggtcctgcaataatcaaagcaatgctaagcaagggcaacgctggagctgctgcaatgcttgattttatactatattacagagccattgtaacaaaaccatctcatcctacagagccatcgtaacaaaaccagtacagcaccagtgcaaacccagacacatagaccagtggaatagaagacccagaagaagccacacagctatggctacatgttttgacagagatgtaaaatacatacttgggaaaataagacagccttttcagtaaatggtactgggaaaaactggatattgattgtagaggaatgaaactagatacatagctttctcttggcacatacatatgtgcacacacacacacacacacacatcaatgaaaactgcatcacaattgtagtctcagacctgaaactttgaaattgcttcaggagagtatggtaatatatttcaagatacaggcatgggcaagaacttcccaaaaaggtctccaaaaatacagaaaacaatcccaagaattgacaaaggggattacagaaaattaaagggtttccttcccaataaaagaaacatttgctaaactgaggaggtagcgtttacaatgggaaaaaaaaacttagctaatgtatactagacaannnnnnnnnnnnnnnnnnnnnnnnnnnnnnnnnnnnnnnnnnnnnnnnnnnnnnnnnnnnnnnnnnnnnnnnnnnnnnnnnnnnnnnnnnnnnnnnnnnnnnnaatgtatactagacaaggagcttacatctagcaatatatgaaggactgcagtaaattaaatatcaaaagtaaattgttcaagctgggcagtggtggtgcaaccctttaatcccagcacccaggaggcaaaagcagggaaatctctatgagtctgaggccagcctggtctacagagtgagtttcagaatgaccagagcagcacagaaaagccctgtttcaaaaaaccagaccaaaccaaactaaaccaaccaaccaaccaaaaacccaaaaaaacaaaacaaaacaaaacaaaaccagcagcaacaaaaatcattcactcaaacagttggctaataacctgagtagacaactttcaagagaacaattgcctagttaatatttgaaaaaaatgttgaacatccttaaccatgagggaaatgcaacttaaaattgcttttggatcccatctctccccagtcagaatgactgtcatcaggacaacaaacaggaacaaatactggtgagggtgcggggtaggatacactcctacacactgctaatgggaccgtaaactcaagaagccactacagaaataagtgtgaaggccgtgtaagtcagctacaccgttacacaacacaactcacacacatacacacacacacacacacacacacacatgcacaccagaaacacttgcacatccatatttactgctgcactgtcattcataatagctagggagtagaaacaactgggtgtccatcaacagggaggtggatattggaaaagtggtgtatacacacacatgaagctgtgacatttgcaggaaaatgggtggaactgaaagtcatcctgcgacagaaagtacactggactctagaagacaaatgcctttgagtcctcttatctaaggagcctcctctctctctctctctctctctctctctctctctctgtgtgtgtgtgtgtgtgtgaagtagaatgtgcacaaggggggaagaactgttcttgattgcgaggaaggggaaagaaagggtaatagaatatactgacatgagaacagaaggaggtgctatttaagagggggaaaaggaccaagtagaggagggtgagggggatgagagaggacagtgggagaagacaatgagtcagaagaaagtgatcacacacacacacacacacacacacacgttataatgaaatcaattactttggatgctatttaaaatgaatgagattacagtaaaaatgccagtccctacatctgtctcctttacaactcagcttttatcaagggtggctaagacagtttcttggggtgcaattgtgacaaatgactcaggattactgacgagatagagcgtgttttatacttcccagcttgatggcatctgcaaattgccccttccatggctgtaacagacatttaatagctgtgcttaagggctttaaaatacttcctatccaatcttcaaaatgtctctttaagtatgatgatgctattatactcaatcctcgtattctgatgagaaggatatatttttcattacatggataaacaggaagcttaggaaattgaagtgactgtcttggtaaaagccttgattgaaacctgggccacctagcttctactgcataacttcttttttaggactgtctactttatgtgtatagtgttttgcctggacatatgtgtaatacatgtatgctcagtatccaaggtcagaaggaggcctgggattcagttccaggagactgagatcctaaattacagatggttgtgagataccacgtgggtgctgggaacacttggccatgaattttccaacctaggcttgctttgtttatttgaaaccaagtcttgctatgtagcccaagctggcctggaactcagaaccttcttgccccagcctcctgagtgtggtatcacttatggctggctttatagcacaacagcctaagaactatacaaagatatagaacacaagggctgatctcacacagcgatacagtcttgttactgtttgcctatggaaggcagctctgctaccacagagaaaggacagaatcttgcctcctgtctctacacccagtgccacagcagacaactagctattgacttttatttttccagtctggccatgctaaacgtcctaaatctaaatgtcttatcttccaccccatacttgtttgtgcagagtttctgaaggtcataaaagattttgtccgattcctcagaactctcccttatctttattagagaatgcaggaactctgtgaaaagattaacaggtggaacaaatctctagcttatgcctctactaggaatcgcatctagtgctggaaagcattctactacagagtgaagagagatcaacattcaagactatcattggctcactcttacctcaccgagaatgattttcactgtaaatgagaatgaacaagttactcagttttcctgtgtgggttgacaaaggacttaaatcctataagcttactgttaatcatctatttttttcttgcccaccttatctttagctttggtgacatttacttaaaagaaaccatgcattgtgtagtggcccacacctttgatctcggcattccccaggcaggtaggaggatttctgtgagttccaggctcacagactcaaaaataaaggaaaaaacaaaaaaaacaatagatgtaagatctgaataacagcatccgtcacgtatataaggggacgtgggtgttgtgaatgcttcatttcggttgacaaacctggggctaagagaaaaaataagaagccctatacagaatgaccccagttatttctttgtcttcttatttagcccctttccttttactgtcttccattgagggttctttcttggtccttaaaacacattcccttttcagaatccttttcattgttagcttctttcttgaaaccagatagttccaggactggatcgttctcatccttcacatttctgctcaaatgccactctaagaggtcttttctggtcatctcaaaataacatctccactcacctttgtgtgtgtgtgtgtacccgttactggcaatcacacacaaagagcagtgcagatttaaagcctcttttctggcttctatgagaatagcacatgcagaatgggtgctgccttcgtctcctctcctgggagcccttgcctagcagggaacaaattcttgaatgaatgaacgtggctctttgggaccctatacgtcgtttcttcttccaagcggtcccttcgcagaagtggtggttaactgaagtcaggtacttgggtctcagcgcccggtccacggtgccacgtcccctgggccgagcgcttagggcagggagccgcctgtggaaacgaaagcaggaaggggaaagtctccgcggaggcagcggccgccaatcctatcagctcggacgcagcggggccttcccggccgggctgactcattcccagccgtctctccgcgagccgaggccgcaagnnnnnnnnnnnnnnnnnnnnnnnnnnnnnnnnnnnnnnnnnnnnnnnnnnnnnnnnnnnnnnnnnnnnnnnnnnnnnnnnnnnnnnnnnnnnnnnnnnnnnnnnnnnnnnnnnnnnnnnnnnnnnnnnnnnnnnnnnnnnnnnnnnnnnnnnnnnnnnnnnnnnnnnnnnnnnnnnnnnnnnnnnnnnnnnnnnnnnnnnnnnnnnnnnnnnnnnnnnnnnnnnnnnnnnctccctagacctcggcccgcccgacgcgtctcggaggagcggatcctgcgcgcctcggggcgctcctgtgtggcccgacccgtgtcgccggtgggtgcagtccctggctgctggatgggggcggggggcagcggttctccctgcgatcccgcctcctgctttccccttagccccctgctactggcagggaacttcaaagctagaaaacctgcgggtttccgacagcctaggaaggagtggctagctgttgataaatgcatgcatccccttgtgccttagaacccgaccccccctctttcttattcttctgtacatttttctagtcatctaaacagcgcagaaaaaaaaaaagagagcatctattggccctgggtttttgagttagtgacttgctgcttctgtttttaggttcctgaagcaggcgacgggaacaagatgtgaactgttttccctccccagaagaagaggccctttttttccctcccgcgaaggtgggtgttagcgctcggggctgcctgggtgctgcagttaaagacaagggtgtctgagatctgcgagccagtgcctgctaagaaggctggatgcttgtgtacaacggcaggactaattgttgcttactgcgaaaatggcagtgttgaacttttcctgttgctgtgggagagtaattgggtggtatttattgtgtctcttggatccttaaagaagcggtctttgttggttttacagtgtggtcttgcagaggaaaacaataagtcgtctctttctccccctttctccccagtcttaattttcaaggaattgaaataacctgttgagggaacaaattggttgtttttgctgggtttctgctgccacattgaatgcttcctgtattcacctgcttgctttgttggttgattgctttccggtggttactagtctatcaggggaaactccttttccctgaatgaaaggaccgagccgctgagtgtgtcacagagaggaggagaaatgcggagaagggaaacagaagtgggaataaagaagccggaggttgcttttggtttcataataggtttgtatgagtgagttgttggcttactgcaaatattctcatatagttcccagcggatttgaaaatgaatcatcaatttctggtcctctttctctatatcctttacctgtttactgtttacggttccagctattaagatcatttggttgtatgtgagctggcttgagtgtgggacgtctgcagactggatgtgcccaggacttatcctgagagtactgagcggtgctacaggcatgagcatttacctgtacaggagagctgcagtgtgtggaggctagataagcacttatgtttattttggcttttgtggagtattgtggaacttgctctgtagaccaggctagcctccaactcagagatttcccctgcctctgccttccaaatgctgggattaaaaccaccacccaccgggcttcatttgtttcttttagtgtcttttcctttgtaatttgaaggtgtcttgagtaaggtgtcttgagtgtgaaaagtaaacatatttttttttctctactttacccagataggctattcttgaaagatgggatccctttctggcaaaatagagaagaccattggctttggagttagatctgagcgtgcagtcttaagttaggataatggtgttcttcccatttaacagcagtgttaacttaaaatttactttctcagaaccttgtgtgggggtcgattggatgcatgcagagcagtaaatggtttggtcgcttctgaacgtcttagcttctcagagctgggcaggcaaaggaggttcctagctggcccgtgcgtagctggtcagtccctggtgcggcttccatagagcatagagaaactgcatgctagtgtatctacagcctctgtatggaagggtttgatgcctaagccccgtggtgctgccccctggtggttaagatgcgcaaagacttgtcctttgctcctcccccattacactgtttttcctttttaggctccctcgcttagttcttagtttcccaaactgtgtcaggtgttagagcaccagggaaggctggctctcaccacttaacctgaggtagtttcagaggtaggaagttccatccgttcctatgggggtgtgtgtctttgtaaagctgtatcttcagagtttactgtatgaaaagctgctatttagtgtatgacagtgtggaacaagaaatgacaatgtggcagtgcttaggatgataccaaggggctgaggaattgtcagaatcagagcagcaccagaccccccaagagtattaatgctaagttgtttgacccaacaaggagtatttccttggtttaaaaataataaataaattgctaactttcaggattcctcaagtggagatagtctgggaacattttcatttggttgcagctggcttttctgataacagttttcaatgcaaagccttagttcataatggcataatgtcctgcttctaataatgcctgtatgacgtctgctaggttcttctaagaatgcctgcatgctgtctgtgaggttcattcacattgtaattactcctcttgtgtacctgcctctctggacacttcatagtttttattttcttctgcacagggctcttaccactacattttttgataatctttttgtcccaaatgaaaactgatattttatactactgctgtaatttggatcttgaatgtccctgaaaggcttttgtgccagagcttttgttgtctgagatactaagatgccaacttctcttctgcttccctgctgccatggcaaccaggcctttcttattttaataatactttgctggctagaaagacagtgttgagccctctacatttccccaccatttcatagagcaggaatagtttatctgagttgtaaaggcccctagacaagacactgcttcaatgtccgtgctcaatcgctctgtttgtatttcctgggtcgccataggagagacttgacagcattacttaagagcctcctttcccactgttcaatcgcatttttcctcactccaggctaagtcctttctgacagttgccccaaagccttattaggcctttacttgacttcctcaaggaagactttgggtgggttcgcatctctttccagctactacagaacggtccctttatccagtgggtcttagaattacatacaggatttactgaaatatatattgttgcattctgtctccagagtttgtgtttcagtaagtccggagtggaacctgtacatttgcatttcttacttgttttccaaggaccaccacactgtgaaaatcactgatttaaattggttggcaaagatttttttttttctgttaaagaacatagtttttaagcggtgttggcaagattgtctcttttgctagtctatagtggaacctttgtagcacagaagtagtcataggcagtgcataagtaaatggcacgctgtgtttcaatgaaggcttatttatgagaacagccaactggctgagtttggcacatgaactagaatacgaaagttcccagttctcacatgattccaccatctctgtgagttactgatgcaccttttatttcgagcaaaccttattaaaagagccatgtttgtcctttaaaaaaaatctttcttaaaatttattttcttgagcaagccacacatttaatgttttattactcaaaagtatttttgtatatgtgttactttgtgaaacagagaagggcttgttggattagaagcggcatgtgttcctgattgcaacacacacactctgccaagttagtgtagaaacacgaagtgctttttatatctctactacaatgttttcaggtggcctgattctagctaactggggacatgggactactcatagtctgatcatttacaaacttttaattttccgctgggacttgtatgttccaggacatacactcttgttttccatatccctgtccctgccaatagtactgtgctttttgttgtctaaatcctcattccccattctttactctgtgtgtgtgtgtgtgtgtgtgtgtgtgtgtgtatgtgtgtatgtgtgtatgtggaagaattcgggtgcctgggaaggccacgagagggcatcagatcccttgatgcttacaggcagtcatggggtggcaccagacagggccagggcgggtggaatccggaagagtaggaagctcttccactctggaaccatgtctcctcaaactctttttcttgtcaaagtctagtccatgctgtaagtgtgcatgcagtgcctggaagcttcctcggctttaataaccacggccgttcttccctggacatctttcagccccaaccaactgaggagtttagtcttagagtatacaggaactgaatgagtatacagtatatgagtatacagtaactgaatgagtatacagtatataatgagtatacagtaacagaatgagtatacagtatataatgagtatacagtatataatgagtatacagtaacggaatgagtatacagtaactgaatgagtatacagtatataatgagtatacagtatataatgagtatacaggaactgaatgagtatacaggaactgaatgagtatacagtatataatgagtatacagcatataatgagtatacaggaactgaatgagtatacaggaactgaatgagtatacagtaactgaatgagtatatagtatataatgagtatacagtaactgaatgagtatacagtatataatgagtatacagtatataatgagtatacagtaactgaatgagtatacagtatataatgagtatacagtaactgagtgcagggtatgggctttaggcatcaagaggcacatttaatatttattaattaaagaaatgaaagcagtaaagcagacattagtttgcagtgaggctagattggaggtaatttttagtcttctcggcttgcctagttcagtagtttcctctgttacgttattttctcatggacaggtgtttgaaaagtcacgtgttttagaattctaaagtgtaggaatacatttagataatattagaatctcaaacaattgtatgtgatgtttctccatgtatgtgtatatgtacatacatgattaagaaatattatagcagctttttaaccttcacttacttgacatcatttcggtgtcagggaccgtggctgaaataattaacgagtcgtcatacttctcacctgcgggaaactttcagtctagtgatgaaagaataccagaaagcaagtatgtgaccttacctttgagaggtcagaactggtggctcttgggtggggcaggaacaggtggagatatcaagcctgaggactttgtggagatggtgatttctagaggctctgggtgacgtggaagagcgtgggccagactgtgactgcattgtgtgtttcattttacatggggggcggggaaaccctaccaatataggacagaaaaatttagatgcaggttcagaattaagcacttgaaactacctccatttcaagaactagtgatttctcagtatctcccattagaatattttgagtttaactttcttttaattgttttttttttcgcttaatacatatgcatttgccttaattgactaatcagttttgctcaacctatttatattaaactttaatttataccttatatttatattaaacttaatatttatatttaatattatgcttaatatattcgtattatatttaaaattatttatattataataatatttaatattattaatttatatttaaacttcatatttataccttaacgcttacagttttctacaacttgctattctattttcaatatttatctatgtaaaattaaagcgacaggtttaaactgccaaggaacttactttctttttttttttttttttttttttttttttacagtttttacagcaattttaatttattttttttccattttttattaggtatttagctcatttacatttccaatgctataccaaaaagtcccccatatccacccacccccactcccctgcccacccactccccctttttggccctggtgttcccctgtactggggcatataaagtttgcaagtccaatgggcctctctttccagtgatggccgactaggccatcttttgatatatatgcagctagagtcaagagctccggggtactggttagttcataatgttgttccacctggaacttactttctatagtgggaacacaccagagtcttcactcattttcttcataatttggttgtttggaagtctgtttgtttagctctgactttgggagtggaggtgcaacgtgtgttagtgtgagtctctgtagggtttgtaactaggaaaagaacccttcttcatggttgtagtctcagcgtgtgcctgagatccttgaaacccttcaagaagggttaacctaacagtactgagatgttttctgcatggcactgacatgtgtacacatgctatagaggcaccagcagataaaacatacctgttagagcatagatcagtgcattgacaccagctgcagtgtagtcaccatagtgtgcatgtgtgtgtgtgtgcacacccacacgtgtatgtcttccattcacagaaaaaggtcaatttgagttacttatgtttttaatttttatacttttctgtagaaaaccagtacatctctggagtgcttgtagagtctacattatatgtgcatggacgtctcacgtaacacctttttaaaattataaattcataattgtatacaaaaagtaaatataaacccgtatgtaacacacggatgaaaaccagtctgattgccaggcctggcagtagacatttgtgccattagctactggagaagctaatgaagtcccatttgggctaccaaacatcttcaaggctagtatggctaacttgggagatcctggctcagaattttaaaatatttcaagaaggattgggaatataaaattcagcagtagagcccttacctagcatgtgtgagggtctctgtttaatcctcaggattgaaaacaggaaaaaaagaaagaaagagaaaagaagaaagagagagccaagctgaaaatatcgtcagattgcagatacaagtagtgagggcaccttgctgggttcctggtatagagactaggaacttgacctcatggtatagttagtttattgctaactatttcttccctctaacttaacagttctcagcctataggtcttgagccctttgagggttgaacaaccttttgacaggggtcaactaagaccatcagaaagcacaggtatttacattaagatttctaagcaattttgaagtagcaacaaaaataattttatggttggggttcaccacaacatgaggtcccagcattaggaaggttaagaaccattggtctaaatgaacaccttgccaagtgctgcctgatgctattgtattaggtaagttgcaggcttaggaagaaaacgtggtacaggttttcaaatcctaaaatgaagctaaaaatcttctattttgttctgactgggtctgcatatatctcttcatgtagaaattttaacttggtattgtcagaactagttctatatatagataaccaggtaggctatgttgacactaaatatggtcttattgttacaattactattgttagggaaaagtgaaggcaaggtgtgtgtgtgtgtgtgtgtgtgtgtgtgtgttatttgggggtaggnnnnnnnnnnnnnnnnnnnnnnnnnnnnnnnnnnnnnnnnnnnnnnnnnnnnnnnnnnnnnnnnnnnnnnnnnnnnnnnnnnnnnnnnnnnnnnnnnnnnnnnnnnnnnnnnnnnnnnnnnnnnnnnnnnnnnnnnnnnnnnnnnnnnnnnnnnnnnnnnnnnnnnnnnnnnnnnnnnnnnnnnnnnnnnnnnnnnnnnnnnnnnnnnnnnnnnnnnnnnnnnnnnnnnnnnnnnnnnnnnnnnnnnnnnnnnnnnnnnnnnnnnnnnnnnnnnnnnnnnnnnnnnnnnnnnnnnnnnnnnnnnnnnnnnnnnnnnnnnnnnnnnnnnnnnnnnnnnnnnnnnnnnnnnnnnnnnnnnnnnnnnnnnnnnnnnnnnnnnnnnnnnnnnnnnnnnnnnnnnnnnnnnnnnnnnnnnnnnnnnnnnnnnnnnnnnnnnnnnnnnnnnnnnnnnnnnnnnnnnnnnnnnnnnnnnnnnnaattgtgcctacaaaccacatttcaaaaagatagccatcttaaaatttaaaacaattcattttatttcaggtgaaaaaaaaaaaataaaagataacatctttctctgtagtcttagttgacctgaattcaacaggttgcttaagttgacctcagattcctggtggtcttgctgccttttagggttaggatcacaagcatgagacactgcacctgcctttccaaggtttgaaaatacacttttagttgaagtgaatcagagcactaagtgtagagtctcccagatgctcagaaacaagcagcccatgttagtcactgctcctgtcaggtgcatgcacagcgtattgctaacatccctgtggccttttgtgcctcctacccctttcctggtcctgctgcgctaaccattgccctaatggtgtcaccacaagcaagagcagctgaaagttgtggaagtagatttgagaggctctgtagttaacacagagttaaaactcagaagcaatgacaaaatgataccttttgaattctggtttcttagatttgcctggaatagaaagtagagacacaaaacattcaattaaaagcatactggaaattttcttcatgataaataataagctaataaccctgttgccaagaaatggtcaaactttgctgcactaacaatatactttaattgacctgttgaaaaacagactcagctttgttacattttccattgttttaaaattttgtttcagtgatctttgtctattcttaattattcccttcctttcgtctaactttgggcttaaattgttcttttttttttttttctcatcccgaggtgcgatgttggaggtcttccttttatctttatgtaagcactgactattataaactccccttgcttcctctgtgtttgattgacttgtataactaacaaagactttataacaaattacaaaaatatttttaaatcatataaatttgaacaagtcaaaaatttttaaggttttataannnnnnnnnnnnnnnnnnnnnnnnnnnnnnnnnnnnnnnnnnnnnntggacgtagaatgaggtctgttttagagaaggttccagggccttttgatgtatattgagtatctgttggattgaactctatatgtcagaagtcatttaatgtacagtgtggttttgtggggttttattttgttttgtttgtttggtttggtttggtttggtttgatttggtttggttttggtttctcaagacaggtttctctgtgtagccctggctgtcctgaaactccctttatagatgaggctggtctcagtctcagagctatgcgtgcctctgcacacacacatatatatctgtagtacttagagcggtactttgtcagtagcaaatgctttaaggttttgcttgataatatttttatttatttaactaatttgctttttataatgtcctgtcactgtgtggccttctccctgcctctgtctatacaccaccactcctgtattatcagttgttgttattaccagtatttttctcattccaatgattacatatattgggagggttgtcaagcttttaatccccagtcatgaaatattccaaataggcaagctcgtattttaggtgccagctagattctggtagaattgtctaagtatgatgtaaatgaaaatgtgcaaaacggttcttactcatttcatcttccagcatcaaagggtggcatccttatttgtgttgatggttttacagatctcctacgcttgaactctgtgcacttgtctttcagttccttgcttcctccatagtcagttaccgtcacgggggggggggtagcattaagtctgtgtttcagttcatgacctcctaaccacagcaggggctttctagcgtcgttattttactgtcctgaatcgtgtatgctataaggtttaaattctttgctcattgttaaaggttaaattctttaactttgtacgctgtccacccagattgtattcatcttaagtaactagagtgtggaggcaggtggatggatccttagcctcttacgtgtggacagggtcatggctgtcagcaggacttctttgtgtctgagggtagctttcctaatgtcactttattgttttctctaataggccaatgttctgaaaaaagctctagatgggaatggcctgccttacaatgacagaaatggaggcaacctccacatctcctgtacatcagaatggtgatattcctggaagtgctaattctgtgaagcagatagagccagtccttcaagtgtatctgtaccattctcttgggcaagctgaaggagagtatctgaagtttccaagtggagagtatgttgcagaagaaatttgtgtggctgcttctaaagcttgtggtaggtattaaaactcactgctttccttatttatagttattattttactcacttataggttattatgctactctaatgtaatgtacatgtataacttattatggctattagccatgtttttacatgcataacaaatgacaacattaaggtagaatttaaagtgattgacatagagttgacattaaaacagattgaagcctgtaaatgtttgctgagaccgcagtaggtgacgaaagactcttgccatgggacatctcatgagtcagtcttttcttcaggtgatacagggtttgctatgtagcccaagctggtctggaactgactgtgtagcccaggttggccttgagcttgtgttagcctgttgtctcaggctctcagattctgagattcaggtctgagctatcatctctagtttcataaggagatcttagaactgcatctttagcacagtgtggaaggaatgtgtacttgggtaaaattcttatttatttacctttagtttgtgtatatgtgcattttgcctgcatgtatgtgtgtatgtgcgccactagtatccctggtgtctgtcaaggccagaataaggtgtgagatacagatggttgtgagctgccaccaaggtcttcaccaagaacgttcagtactgttaattgctgacctatctttccagctcctgggtaaaattcctgacttaaatattttacagttataagcaacagatctttttttttaactcctgaagttctttatcaacccagtatatacatttctctccattcattcattcatttgtttgtttatttttgtgtgtgtataccttgaaatcttgaaacttctgaggaaacagttgtagactgttcagtatcattgataatttattatttataaggttcacgatatgaatgaaagggcataagcatctaaaatgtaaccatcaccctattctatttcgtctatagcatttacatttagaaactagtgaatgaagatatgtagcagagcccattcatgcttcggtaatgttatagatatagctccattaagtgcaaggagactgggaacagtggaacactgaggaagaaagaagtttgtaggaagtatttaggtataaaactagattgcataggacaccccaaggactaacccttttgtcttggtctttgatgaaccctgtttctaacaacacacagttaaagggaagttaacaggctgttttgtactttctgcatggcttgttttagggggataggttgattccctttttcatgtttatccatccacccacccacaaaagctactaatatggctgatctttaaagataagcacatagagctggagaggtgggtggctcaggttagagagcttactgctcctgtgagggctctgggttcccaggaatccagtgccctcttctgtcccccgagagcaccaggcacatgtggagctgtgtaaacagataggaaggtaaaacactcacacacacgctttatttttatctaaaaagtattatttaataaaagactgcataataaaataattaaaatgtgtacgtattttatgaaaatatattttagctgggtataatggcacacacctttaatcctagcacttgggcagcagaagcagttggatctctgagtttttgttaatataaagtacttatacatatactttatttatataaaccatacacatattttcacttaatatatacatatgtgtatgtatatatgctttaagtccaagaaaaccttactttcttctgttgaaatgcggtgtagttacgtgttcattttccagtgccgttgccatactgcttggctcactgtggcttgctggtaagttactttttattatttgcagtgtgctcctaaggctgaactgcctctctagccctgaagcaagttctgtagacaggaagtagaagttgttaaactctactgttgttttataagattgtttgacaattttagtgcctttggtttcttcccatgaattttgtgattattctgtcacttctacataaagaagagcggagatttctgtagtgcttgcatcacattgatgtttttttatgttacaattctattttagaaaatcaaatgatctagttatctaatttagttttttttaaaaaattatacaatatattttaatcatatccttttccctcctcacaacccagcttcacatttttctctgtgctgggattttgtctagtttgagcctgtgtgggtctgtgtttctgtgtgcatcagccctgttgtgtctggaaaacactattatccttggaaatatctacgacatttggctcttaaagtatttctacctcttcttttcaaagatgcctgagcctgggaagagagatgagagagacataccatttagggtggttgctcgaaagtctctcgggtgttagtcattggtcagttgtagtctttggcatttaacagaaacaagcagggatgctgggtggttgggagcagtccaggctatgccctctacagtgttacggctgtgtgtgggattcttagctgcagtccaggctatgccctctacagtgttacggctgtgtgtgggattcttagctgcatatgtgctgcagtccttgtgtactcatagcaagtcagtctttcttagttctcagcaacaactagagtttgttcccaggcaggcctaggtattgggactcctcagcccttaacagtggtcagtgttacacctttgaggctcggggtatctgagaccctttcctaaaggcctggcaggtctctagaaggctcccataagccagaagtttctcttttctggctctttacagaccttgtatgttcatgagcttcagggtctagtctctctgtaccttggtctcctttaccgtgtttgagcacatgagtgcttctgctgctgcttctggcgtcacacatttggttccttcccgtgttgatttttacagctgaacccatcaactgctaagctgttgccattgctgctgctgctcttaccggatgctttttcctgttaccagctcaaccccagcattcaaagtaggcaataaagggccattgaagaggaatatttcatttgggcctaatgttaaaatataggggaaacagaacaggatgttgtctcttagctggctgggtaagagtgtttgaaccaagcacagcaaacctcacatgtgaaggaaggcttgtcctttcaccggtctcagcctgtcctgttagtgccagtcacagtagtcctttgtcaggcagccaagggaagtgttttgctctggcctgaggtaatgtttgcatgatcgtctccagtttgccgaggcttattatagtaaaagtctagtacagcctttgaaatagtgctgcctgagactcttccagagctggaccaagcagttgtatagttctcctcaggagtccgcagagtgctcagaatggccagtgttggcatgagggtagtccagggggctgtttgtcccgcttttttttttttttaaaggcagctggggcaggaagagaaagtctgaccggctgccagtagggagtccaattgccctattctccagtatctgcttatttacgggaaagtgagcatgagaaggaggaggaggaggaggagggtttatagtaagtacccaaaggccttatcattggcacagctagtgagtttaagattgcatacctgtccttagttcctcagaggtgggtgtgcctctctcacctctcttgatacgttccattctaatgtatttgtgaaattaaaatttttcttttaatgttctcttattatattgtagccagagaagataactttggatggttttaaccttaaagatttttttttttgacattggttttgagatgtatgaacctggagtatattttacattctgccctatgggggcaaagttttttttatatgttagtaatatctagttgatttgtcctgctcaggttttgtctttattgagaatagtatgttgaattctccaataagtattgttgaattgtctatttttcccctttacatctgagtttttggttcatagtgtgttgataattgttctgtctttggttgttaattttttttgttagtttttttgaaacggggtttttctgtgtagccctggctgtcctggaactcactctgtagaccaggctggcctcaaactcagaaatctgtctgcctctgcctcccaagtgctgggattaaaggcgtgcaccaccactgcccggcttggttgttaatttttaaccttgttaattttacatcgttaatttttcactttaaatcttattttcttatattagtataaccatgctggcttttgttttgttatttttgtagaattttttctatctttctcctcctttcaacaacctatttgcatcttcatattttaattgagtctcttaaggacatcatgtagttaagccatgtatttttgtccatataaggaatctctaattttaatggaatagctgtatgaatttgcatttgaaatagtgatagcgaatattaattcctagtatttaattctttactatatactgtatctttctttttaaattaattttttttcttattcactttacatccagctcactgcctgcctcctaatcacccctcccacaatccttcctccatccccccacttctcctctgagcaggtgggacccccccacccccaggtatcttccaccctttggggccagcaatcctttctcctattcttccataagaatccgccagctgcattcactgtttggctgtgggtgtctgcatctgtctgagtcagctactgggcagagcctctcagaggacagccgtgctaggctcctgtctgcaagcattacagagtatcattaatagtttcagggattggtgcttgctcatggggtgagtctctagttggaccagttattggttggccattccctcagtctctgtttccctcccctatccctgcaattctttagccttttttgtgtttaattttttggtggtatatgtcttagttagggtttcattgttgtgaagagacactgtgaccatggcaactctaaaaaaggaaaccatttaactgggctggcttaaagtttcagaggtctagtctattatcatcatggtaggaagcatggcattgtgcaggcagacctggtgctggaagggccaagggttccactgtatcactgggtgtggcttgagcatatatgagacctcaaagtccacctccacaggacacagttcttctaacaaggttacacctactccagtaaggccacacctcctaatagtgccactccctatgagccaagcatctgaacatgtgagtgtatgggactattcctactcacaccatcacagtatataatttgagtctcacttttgacgtatttttagttttattcgaagttctaaaggttagagttaaccctgtacatgtattattttctttagaagtactgacagagtctacctaagccagtggctttattcctgttgtttgctgaactcgataacactcccactgtcgcaggctttcttcttctgaagcttatgtgctgctttgtcactatgttatggctcctcacacaggaggaagtgccaggtggacgtgtttaaatattttatacacacaaggtcctcaaattagatactgctttttccaaagctaccctagtttgtctttctaacgaaattgtaacaactgtagttcacaggacagctcactagtaggaatcttgctgtttttgctgaaatgaatggcttaaagtgctgttgtgttcgattcgtttgcacttccttcaacactcggtattgcatgcctgttgtgtggatttgctttacaagaaataatatttcattctgtagcattagtaactcttaatcttcatttttttaattataaaatacttcagttaatattttatataagtataaagtacaaaccagggtacctaggatttaaattttatcattttgccattttgatttctatagtgttattttgatatattacattaatagaatttactaattttctaatttagctctctctgcaattctttgataaatgaacaatggactttgttgttttttttttttttttaagaaacatttatggattgggtttgttagtacttagtttaagattcttatattttgataaatagaaatttgtgttaaaacaaaatgtcttttgtgttttggttatgctttcatgtaacttctgaacctggttattttcattcgttccggattttccttttattctcttcaacctttattttccatttaaaaaaatgtaggtagattctatgtcttatgtaatgtagttttatttagttttttatttcaaaatattttttaaagttatatttttctgaaaattgtctatctttttaaatatattggtgcaatgctcttctagcactttgtcttttaatttgcttttaattcagcttgcatctatttttattccttgttagatatgacaatgactgttaattttgttaattattaaaaaaaatcaacatcatcgattagttttgtttactctgcactattaactttcacttttaaaactctttgtgtgggctggagagatggctcagtggttaagagcactgactattcttccagacatcttgagttcaattctcagcagccatacggttgctcacaaccatctgtaaagggatctgatgccctcttctggtgtgtctgaagacagctacagtgtgctcatatacatacaataataaaaagtcttaaaactctttgcgtnnnnnnnnnnnnnnnnnnnntacggatatgcacatgtatgcagatgcctgcaaaggccagaagaaggtatcacattctcttagagctggagttacaagctgttgtggacagcttgaaatggggactaacaattgtactctagtcctctgaaagaacaatgagtgtccctactgctgagcgctctccagactcttcctctaactttactgttttcttcttttggctttctgccattgttcttttgttttctgatgtactgatacccaggtgattctgttattgtctgatgtaaatgggttactacatataatttttcctatgagtacatttaaatttcattaataatttttcctttgacatgagatatttataaatacttgcagttgaatttgtcgcagatctttctttgacctatgaggcatattgaagtatttgtaaatacataaggaataaagggtacctttaaaaagctgctactgaataacatttataatttataaattactacaaacctacagagagttgaattgagtttcaaattataatttaaatcctatcagtttatcccatttatgtataaagtggaaataaatgaatatattgttataataaaaatattctcatgaaatataggcttcaatataggatttatttttatgtactcaattctgatttaattgaaatgctagaaaaggtggtgtgtgaagacttgttttgagtcccaggggattatttggtgcgttcatgtacatatatggatgtgtgtggatggtttaaaatatacttgaaaaataatatatactattatattgctatgttctatgtacttttttagaccattgcccttcaacctttacaaatatcttttatatttattttatgtgtgtgactgttttgcctgcatgtatgtatgtgtatcacatgcatgcctggtgctcaaggagatcagaagagggcattggattccttggaactagagtgaaagatagttgtaagctgctgtgtaggtgtgtacatgtgcatgcctgaggaggccagagtcatcagtcagttcctgcctgatagatagagttagaggtggctgtgagctgcacagggtggatgctgtcagctgtcttaggtcctttgcaagcgcactatgaatcttaactgacgagctagctctgcagccctcctttaacattttatgtgtttcttaacatatctgccccctagtgttttttctttctctcgtacttgaaattgaacctgacagctcacaccccccagacatgcactccacactgagctctgtccttacttctgcgaagtgcctgaaaaagatgctgatgcggtgctacactcttgtaatcctagcagttgagacacggaggctgccctgtcagagcttaatgtcagcttcatttgcataaggggtttgaggtcagcttggactacataagaccctattacaaaaaggggaaaggatggaaaaagtatttgggggcagagagatagctcagttgtcatttaacctgtaaggggctagtgagatggctcagtgggcctttacattttttttttaaatggtgcatcaaatataattattagtatagtgtgtaaaatttctcattttaatatgaaaagttttcattcttataaaagtatccagtggcttgttattatctcagtgatttgataattagtatcaattaaaatatacacatgtatacttgtgcatactcatacaagatagtttttccctcagggtttaagagttacttggaaactctctttagaagacagttaaaagctggataaactgtacttttatcttcatgtaagaatgccagtattattttttacaatatatagagaggagtatttgattaaaacttagttttagggagtgttttcccacggtatttcacctgcgactggagtttctgctgactgttagagctgtcaccagggctcccagattgtgttatgtaaatgttctgccctttgcatctgcagtcagttccttatgactcaccggctaggtatcacgtcacgcagattgtgcatgttatgtaaatgctctgctagctagctataatcagtcccttttatgcttcctttctaggtattacgcctgtgtatcataatatgtttgcgttaatgagtgaaaccgaaaggatctggtacccacccaatcatgtcttccacatagacgagtcaaccaggcatgacatactctacaggataaggtacttcctgacgccaagtgactcgcgtattagcaaaagataaagccagagaaactgttggctctgtaaggtgatagctacgatgttttgttctgttggaatgccacttcatgacttttgattataattaagaattttaaaaaaagaacaggtgaaaatagcctgcaatcagtccttagtgtctggaatattgccagtttcccaggagatgtgatgtgtgtgcaataaaaagcaatcttaacaattttttttttacaaataaaattttaaagttgaaagtttttgtttataagttaatgtatttagctatatatggcaatgtgaaaaatattaatattcagaaaataaaaatccagattttttttctgtataaaggaatagcaaataattttggttttacagatagctgtaaatttccaagcacttacatgttatttaattttcttatgacttaatgaaacattcagaattccctgtaatatataaagaatctgatgtgacgtattactcatagttgttcatgctcttaccgcttggaaaagtttgaactcagacctagctttcttcataaactgccttctcaccagcttgcttttacctcattgtagagataatatgtgtagtatttactgtcattatttgatggtctgtcttattgatttttatttgttgagacaggtacaacagacttcctctgacctcactgactagcggggactgaccttgaacctgcctcttaacccccagtcattctgagatcacaggcgtggccaccacacccagttggttttgctgaaatcaaacccagggtgttaaatgtgctaggcagagtggtgacattattagtacttaatgcgttcttagtaaattttcatatttcattacttattttcttctccttggtctgtataaaatatgtagatgcatgtgtttgggttttctgcttttaaggtaaaacaatgttagtaaaagagttcagggtctaagtggtgaacataggaaaggcaggggaatgagctggaggaatggcttggaggtttaaaagccctggctaccctttctagaggacccaggttccattcctagtacctacatggcagctcacaaatgttccagggggggtctaatgccctcttctggcctaaacacaaaatacatatgcatatttattttagaagaaaacaaaagtaatggcctttttacataaagtagccagttgtaacaaaataatgaagctttcataaaataattttatagctttaactatttggggataatctaaataagtaaaaaataagaaacaatgtgggtgtgggtgtcagagtttgccttttttttttttttttttttttttttttttttttttttttttgagacagggtttttctgtatagccctggctgtcctggaactcactttgtagaccaggctggcctcgaactcagaaattcgcctgcctctgcctcccgagtgctaggattaaaggcgtgtgccaccaccgcccagctcagagtttcctttttagcattataataaacatgaccaaaagcaacctggggtaggaaagggtttatttcatcctacagtttacaatccatcctgaagggaagatggagcagaaactcaaaggaggaactcctagagtcaggaactgatgtagagaccatgaagaaaccagcttacctctcctgtcttgctcagataactttttattttattttttattattttttctttctttactatatgtaagtacactgtagctgtcttcagtcactccagaagagggcatcagattttgttagggatggttgtgagccaccatgtggttgctgggatttgaactcaggaccttcggaagagcagttggcgctcttaaccactgagccatctcaccagccccagataaaattttaatacaacctagactcacctatccaaaggtggtagcatacacagtgggctagacccttccatattgatcactaatcagaaattacttgactacagaccagtcttacggaggcaatttataattgacatttccattcacaacataatggtagcttgtgtcaattggaaaaaaaaaacaaaatcttaaccagaacaatgaataaattagagacctacttggaaaatgaaaatataactaagtatccatggtacattgagcctttttggatatcagatttcatgtatgttcaaggcgaaggacttgagtaaaaacttctccaaagaaatgtttggcatgcaaatagctaataggcatttgaaaagatacccaacatcattagtcctgtgagaggcataaatcagatgtgctagaggttaacaaccaatccactaggatggcaaaagtagacaggcaacaatgttgaaaattatttgtactaattagaatgctcacacactgtcagtgagaataggaaatggtaatggcacttttggaaaagattggccatttctcccaaagataaatacagtgttgccaacatgaatctacaaaaacattcttcacagagtgttattcacgttagcataagaacagaaacaactcatcatttaaagtaatgaatgaatgaataagatatgcacatcatacagtcctgtgctaattcattaggaataaagtacatgccacagtgttgataaaacttgcagtgtactaactaaatgtgatcacataaaaagacaacataccacagccattcttttgagtataaagtgagtagaatagaacttgtgaaggttgtagcttgtagctagaggttaacagggtgacttgagtttgattgctaatacctatggagacagaataaaaatgtgaaatcaaattgtggtgatattggtaccacattgaatactacagaccacacagcactttaacgtgcagactgtatgtagataaattacatctcaaagcttttagtttcaaaagtgagtgtacttaatttttctttgaacggtacattttagtgttcattttcttaaaaggaggaattatttgtgtgcacagtagatttcacttttcgatgccttactagtgttgctggacttaagatttttgctgacttttatatctacctcacttcagtttcccttgattgcttctcttctccatcctattacttattactccaaggtgggctgtgtgctttgagtttagagttacttacgttccacctgctgctgctcttgcttgatgctgtgtttgtttgttgtttatggaaacaaagtattattctaggtagcccaggatagtctcaaactcagcttctcttgctccagctccctgggttttggggttacagatgtgctccaggatgctacactctgtttcttgtgttttctgctgacattataatcatgttatcatgcacaaagccttttgtttcacaacctgcattcagcactgctctctgtgttttatagcacagccctggtaacttttagtgtgctgagggtggctgaacttagtgctctgtgcttgaactctggaggctgatagactgtctcgttgtcttacaggttctacttccctcattggtactgtagtggcagcagcagaacctacagatacggagtgtcccgtggggctgaagctcctctgcttgatgactttgtcatgtcttacctttttgctcaggtataattataatatagttaacattaatcctctttatgtgtgtattaaaccagaaatttcttcctatttagtatgcatcttaagtagagtaactttcacgtgggaaaatgcagctctccctgaggcaccaggtatgaagagataagggggtagtctgtgtgataatcggtttccatctcatgatttacagatgtattttataacgattccatgaattgacccttccaaagtcactttttttttcttttaaaatctaagtcattttaaggattttttttttaaggtagcataaatttaacagcagaattcatgtggccattgggtggtaaaattctatagagtttttaataaataaattttggatactttcgtgtttacatggtaggcagtaaaatgtaacaagattcctctacaacaaacagagtgagctgtgatagttggtaggcccctcaagggaggctggccacgtttgatgcttagagtgggagctgtgttcagctatttgtccactagtactataatgatacacttctgtagtgttatttgaacacctcgtaatgcattcttttctattatctttaacttaacagtaattgaaatattttctttttaaactattttgttttcatgggctactacttttaactgtcctatcagggaaaaaaacatggtgagacaaatttattgaaaaatgaaacaaaaaaacccaaaaatgaaacaaagtgaaaaacaaaacaaaaacttctattgcatcattatgagtgtctagccatacaagaatactttctgcctggtcccaggcaagctacccctgccagtctttctgaggtgcctgtgctctctctttgcctcattccttctatgtctttgctctgctttgcacctgtcccaatgccttcatcattaaagaaaattaggtttcaaattttgcgtgaaaccttttaattatgccaattgtatacgatttcaacactctctaggttcctaaagtgtctgctgcgtggtacttcacgttctattagctgacatagtagtgatctgcttctgtgtttagcttccaagaaaacaagtctggtctttctgatggattaagaccaccttctatgtttctttatagaccacacaaactctagtacaatgccttcaatatgaagtccgtgtacatttgattaattaacatttattttggtttaggcatttttaaaatgattttaagataaagctttacggctgggcagtggtggtgcattcctttaatcccagcagttcggaggcagaggcaagtggatctctgtgagttctagcctgtgtagctagcctggtctacagagcaagtttgaggacagtcaggactacacagagaaaccctgtctggaaaaacaaacaaaacaaaaaaaagaaaaaagaaagaaaagagaaagaaagataggctatgaacccaatttaaatcagtttctatttgtatatgaaccttggttaattctttgtggtataattctttgtggtataatgataaaagcagaacttggtttattacttttaaatgcgtattttaggagctaacttatagcatataacataaatgtgatagtaaaacctgagccatggccttatcgtttctgtttttcagtggcggcatgattttgttcacggatggataaaagtacctgtgactcatgaaactcaggaagagtgtcttgggatggcggtgttagacatgatgagaatagctaaggagaaagaccagactccactggctgtctataactctgtcaggtaatttcctctcacaaagcattacatactttgtatcgtttgcttgtatttcctgtgtttgctcacacatttgattttataataaaaatggaggggttatggagatggcccagtgggtgaagtacttactgcactgtggttcatatccctgaaccacataaataccgggatgacactgtacacctgtaactgtaggtgggtaggtcaaggcagacagctctcagggtgtggctgaccaccgttcgacacagtcaacacagtgagacgggtccaggctccgtaagagactgcctcataaaataaggtcgagggggctagagaggtgcttgctacaccggcttgctggcctgagtttgatccgtgaagcccacaggaaggtagaaggagagcactgacctaagagatttatctctgacctccaggcaagtgctgtggcagtgtgcccccaaacatgtcatgggcatacccacaataatataaagtaaaactttaaaatagggtctgtactgggggagcactggctgacttcccaggcttggggattctccgcacccacatagtagctcggtcaattggaaccccagtccaattaggtgggaagtgataaagacaccaccttgactctgacccccttgaggttgcatagcacatacaccagcatgtacatgcgtgctccccacatagaccgctcagaaactaaaacagttaggggcaaactttcctactacagcgcatactctggaagagattgagttttcaggctctataacatcacaggtgttcattatttgctttatgtgttctgaaaagactcagtaagttcagaataatggaaaaatactttaaggcatagtatttcatgcctagttcttatattgtgcacatgatctgaagcgatagttttcaagtcatggttcataacttaggcatattagacttctatctggcaaatgacccagaagatttgaatatataattattttcttgattcttttaaccctctcatggaatgaggctataaacctgtatacaagctttttttaaaaaatcacctttctgccttttattagtgtttcttaactgtacaaagtaatggtttccttttattttcgtacatgaatatccacctcaccactgtccaaataatccccattctattagtggaaattttggaattttggtgtctttaaaaaacagaatatgataagaatatttttattttaatccccatcaaaggatatggggatgcttcagattgtccacagcagttaactaagattcgcctcatgctctggaagaggtgtgattttgccacctgcagatagtttctgcaattgcgtgatgtttggaattctggggactttttagaaggtgtataagaatgtgtattagagggccctaagaagcggggtgagttgttggttggtagttggtttattgttggctgtgattcgttaagtactcatgtgcagagaagaaaaagaaattagataaagatatctaattgatggtggagatcaaacttgaaccaaggaactggacatccttagtcagcaggaagtagggtaacgataacatcgccaccttcccaacccctgacttcattcaggttctttcctctctcccctctctctttcctttctctcttatctagtggtagggcactgaaagggtggaaaaaagaacgcccaagtagcacagaacaggtacaattctactttgtggtttttttcagaaactctggactccacctatgagaggaaatatttagtagttttttgtttcttttactttaaaaattgataattattaactagtcataagggtttttgtatacatgcaactgacatatcacaatgtatacataattaaaaccattaaactttttaagtacattcacaacattgtataaagagggttacacacaatcttcaaaacatttctttcttcctaaaagaaaccccatgtacatttgtgtttcagccctagtcttcctttccccagactctggcaaccattcatctatctctgtctttctggatttgcttattttggtctttttatataaatcgaaccatacatggagtggcattttcctgagtctgacttcttctgatgttttctctaagtttttaaagttttttcattatcaatgcaagtgtatgacagtgtgggtttgtgcatgtcatgtggaggtcagaggacagctctcagggatcatttctcttccttcattgtgagcgctggtgatgtaactcaggtgtggcttgcttttactgagacctcttgccaaccttagcacagtgttcttcaggttcaaaggtacaatagcctatatcagctatttcattctttttattgacaaccagttccattttatgttatgtttttgaggcaaggttttctgcatagctgtgactaacatagaatgctgtgtaagccagggtggtcgagtgcacagcggtgggcctgcctttgacacacttgaggtaggattaaaggcatgtgccactgtgccctgcatgttatttctctctttgagtcctcgtaggggtagcggtgtctaagtgtgggttgggtttcattttcccagtgactgctgctgattagtagcttttaaaaagcttattgaccaaatgcatatcttctttgaagattgttcatttaaattcttggtcatttttaaagtgagtaatttatattcactttaaatttatttaaataaataaatgcatttatattgtgtttaattttttttatattctagatacaagataagtaaatctctagatataagttaccacatttaaagaacttaaaatgctttttcataatttgtgaattattatcttttaaatttcttgattgaattatttgtggaactcaagtgaggagatgtaaaattagaggtgaaatgaataaagtgttagctgatcacaaactaggccatggtagtgcctcctccaggacatgtggtggttgggttactatgagaaaaatgagcgagcgagcgagagagagagagagagagagagagagagagattgattgattgatttagagagaaagtcaaaggctgtaaggaaagataaaacaaaaggtcaacgaggtttccagggcttgcagaaatgggtgaattgtgctatgtctcatttattcctacttagcatgggtaaactgacttgcctgtgacgggtgtgggtttagagcatagtgatcggggatggagaaaagcaagcgagagagagagaacctagagaaaaagacagtggataagatggtccacatcgagtcttgaggaattacacagtatttactcacaaagcacaaatcccactaatccaaaatggagatggaaaaggaatgcacaaggagatgcagagactttcaaggagagagagatactggtgttgaatgctgctgaaagtgtctaaggaaaacagaaggcacgtttagtaaggagagaggctttcctgacagtagcaggaacccttcccttccctctgtactctgtagctgctgggaacatgaatcaaggcaagcttaaatttaatatgggaaggacgttagtatttaaacatgtgggtagaagagagataatacatagaataaggttgagaggctctctctctaggcgctctctctctctctctctctctctctctctgtgttataggaagggagaggtatgagtgggtgatacatgtgaaagaattagcttttatctgtcaggtttatacctcatttattgcattgttgggaaggagaagacaatgagcatggatgtgtatagatttgttagcagaaatcttaaagaattcccagttagaggacctctcaccccagcaggcatacacagtctgcatgaagccatnnnnnnnnnnnnnnnnnnnngcatacacagtctgcatgaagccataaaagcatttgttgagaaagaacacgaggaagactatggctgaggtttgaaacagaagaccatttggtttagaatagctgtggaacagagaagtggagtaaaacagtatgcttgatggagctattggaaactggtaattatcaacctagaacataacccagctgtcctctaatgtagctttcgttagcaattgtggctacttgacctcacagctttgagagccacaagaggccttgtgggaagtaggaaaggtataagctatgaagctttggtaataataccagacaattccaaaaaatagggaaaaattctgatttttaaaatctttgcttatatttatggtatatctataatattgttatgtcctgatgtcactgaatgtagattgaggagctctggccgtgcctcaccactcacatttgaaggcatagacattggtaaacccacatggaagtttaaaaataattaaattatgacttttgactgtctattgactacatatttaatgacatttgattataaaatacataactggaattttagtgactttttagcagtcagctaagagtcttttaaaatgatgagtacttcatctaggacaggccttgaatttcattggtggaaaataaataggcccagaatggtgtaggtgatgctgtgaagtggcgcccacaatattctcagaacagaggctggaacccctatttcacctctggaataaatactggaccactttcctctcataagagctagccagttgccgggcggtggtggcgcacgcctttaatcccagcacttgggaggcagagacaggcggatttctgagttcgaggccagcatggtctacagagtgagttccaggacagccagggctatacagagaaactctgtctcaaaaaaacaaaaaaacaaaaacaaacacacaaaacaaaacaaaaaaagaactagcccgttgagagatggatgttcggagtaaaagttagcatgcagatttaatgtagatgtgctttagaaacacagctaggttctagaggccattgtacatagaaataaatatacagaagaattgcaaaatttttaaaaggaattgttttgatcagaatgaaattattaggacttattgaagctaagctcacaaaataatacaaacaataaagtgtgtttatatagcaagcagtagtgtccagccatggatgtttgcagaattcagaaaaaatttggagtatagcattataggaaatatttgtagcacagagaaataaatgcccaaacttataaatcatttcaggcatataagataattagagaaaacaagattttagagactttattattatctagacagtactcatttcactttgggaagaaaattaataggtcataaactgtgttgtcaccaagagaatgcctatcaaatgagaatgcccatcaaatgagaattttttcttgcatatatatcagatggtagttatgttgaacccgcttattgtgggaaaaggcaggaactaatctcctgaatttgtttgctgtgtacttgttgtttctagctacaagacattcttaccaaagtgcgttcgagcgaagatccaagactatcacattttaacccggaagcgaatcaggtacagatttcgcagattcattcagcaattcagtcaatgtaaagccactgccaggaacctaaaacttaagtatcttataaacctggaaaccctgcagtctgccttctacacagaacagtttgaagtaaaagaatctgcaagaggtccttcaggtgaggagatttttgcaaccattataataactggaaacggtggaattcagtggtcaagagggaaacataaggaaagtgagacactgacagaacaggtaatcctaatgatacattcttgctctttcttctttatgtagaatgcccataaaagcaaagtaaatgtggttatttgagtaaagtcttgccattctctgctggtagaagttttatttatgtaaaaatgtaactatagtttgtatcacaatgttcttaaatgttttgttaatttttgtggcaaaataattagtaatgactttcttccagtttcagagaaagattgaattctttaagtaatttaaagttaacattgtttcctttactctttaacttctgaaatttaagtacaatcataagactaattgattttgataatataattaattctattatatttgcattggaacactgaaactgttcacatgtatcattcgtatatgatttcagcaatttagtattatattaatttttaaaatagttaataattctctacttttctgacaatcattctttttaatattaactgggttaagttctgtatcacactgtcatactttaatgctctcactttttttagtatgtttttttttaagatttatttattttatatatgtaagtacactgtcactctattcagacacaccagaagagggcatctgatcccattacagatggttgtgagccaccatgtggttgctgggaattgaactcaggacctctggaagaacaagcagccagtgctcttaatcgctgagccctctctccagcccctagtgctctcattttgaagtcaatacaagaaacataaacttcgtcttcaggttcaatatttaggagaagtaatctcatccgatgcctatacattgttgtcagtgtccctttagagaactttaagtggctatcagcaccttctcaagcttcgtttgatgtcactgtgccttcctaaatgttcttgattacaggacgtacagttatattgtgatttccctgatattattgatgtcagtattaagcaagcaaaccaggaatgctcaaatgaaagtagaattgtaactgtccataaacaagatggtaaagttttggtaagtttgtattatacattagtaatgtttccattttagaaattttcagaagtacaatagagtcttagtatcaaagttacttaagtattttgattatagccgtaagtatgctctaaagagtgccagcccagcaaaccctttattgtatgcaatctgggaactagaggaaaggcaggaggatgcatccttctctgatgcgtgagtcatcacttctctgatgtccactccgctggtgttcagagtcccatgtttgtctggttttcccatgtgtatcaactggagtatctgttggccttctcttggagactgtgcaatttagaaattaatttggaatttctgtgcttgttttgtttttgtttttcacgagacagggtctcactatgtggctttggttgtcctgtaaaccagactggccttgaattcacagagatctccctcccaagtgctgggcttaaaggcatatgccattgtgcccactttaggagatatttttatatttttataatcttgaatttccttatccaagaacataattcattttctgtgtatgcagataatgtgttacattgtacaagagtattttgaaacttttaacaatcattttcaattttttggttaagtttaattcaacatagggcatttttcttgctgctataaatagggcttttttaaaaagcattcaattacattgattattttgataaatggaaaataagtactttttaagtatgtgtgcttttctattagataaagtgacacatttttgattatatgttcatatgtatatattttaataaaaaaaaatctcagcatacttccatatcctaacacatgtagtttagtctgagcagtatataaaaataaatgtttgtatttataattaatctcaacttttatgtatgtattagattctgactaactctctcagggtcattgaagtgtatagttatgaatggttagtgactaactgggaaggtgagctaagcctgtgtttgggagggtcttacatatcagatagaaggatttgttaaatcatgctagggaactaactggaagttatacaaaatatttgaacaatttagaggaaattaaccagaatagagtatagagaatttccaacattagaatttaattggttttttaattccatggttttctttttcttttctgattaggagatagaacttagctcattaaaagaagccttgtcattcgtgtcattaattgacgggtattacagactaactgcggatgcgcaccattacctctgcaaagaggtggctcccccagctgtgctcgagaacatacacagcaactgccacggcccaatatcgtgagtaatgccacatttcacaggacagttctaggagctggctggtaggttagcataaggactgtggaagtccgaattccaggcactccagtacaagactgaacatagccgatctaacagatgagacagtcaggcacatcccgagagcttcaggccagacagacagctgagtgctgctggctcagtgagagacctttcctcaaagcaacaagacagttgtaaggaagacattgacacgctgtcctggtcaccagagtacatttttcagagggaaatgttctacaaagtgtgcttaatacccatgtttctaggtcagtactgtgcaggggaactttacacagtgccgaaaaggttcactgtttggacattctaattaaatatagtctggatttatacttaattgtattttcatttctttacctttcaatacccaaggctacgaattactgttctagtttgctttctgttgctgagcagaagcaacatgaagagaaacggccttttaattggctcacagtccaggtcacagtccatcatagagggtgccagagcaggagctcaaacaagaaccgaggcagaaaccacgcaaaccctgcttcctttctcactctccttgtttatgggcagcctgcctaaggaaagcatcgtaggcagcaccctcccacatcccttaacagtcaagataatcccccagacgcggccacaggccagtctaatctgagcagtctttcagttgagactccctgtttccaggtggctcttggctgttctcagcagggcagggaccttatgaccacccagcacctttgcaggcctcctattgttgtgtaaattacatcctgctctccagtgctgcgtctttgaaatttatgcacatactaattcttttggcacataggacatttttggactggtattttccagtcactgcagatcttcggttagatttgatactgttgtaaatatagaaagatgattttgtattagtatttctgggatagaagagacatgagagattttatgggagtatattttttaaattattcaatttgtaaaaagcagaacatcaaaatgaatgaattttcctcgtggctttattgtttcgtagtgtcttaaaataatataattattccttgaattggtttgaactcactacaaaataactcgatacacttatttctcttgaaaacaaattttgtagctatatatagtagggagtgttctgaggcgtgatttttatttggttgctgtggctgtcagtcacatgtgcaagctgccattcatatgatttctccttgacttgtagaatggattttgccattagcaaactaaagaaggcgggtaaccagactggactatatgtgctacgatgcagccctaaggacttcaacaaatactttctgacctttgctgttgaggttagtaggtcacatttattaatagcaacatgttgtgtaatctgtctttctccgtcaagaagtattttatttttaatattaagaattatagttcttgagatggtaattggcatagtcatacttggcatatcttaaaatgtcataaaataaataattcataaagttaatgtaaatacataaataactataatgcctttgtttttgacgtttattttattttttgatgtttgagtattagccatgtgtcaagtggttatttcgttaagtatactcaagtctacttacaacaaccaaaaatatttaccaaatcgtttagaggaaaataagtgacaagaacatttcctgattctagaataggttactaactgcgacattcagagcaccagggacatgattgcatataagagtgcactggacactcactgttaaatgcacgtgaatttggatctcatcgaagattgtttatccatatttatctttaaaatatatgcagctacatgctctaaatcttgagaggatttgtagcaacatctagatttattttataaaaatatagaaggtaaagatgttattcaattatttcctaaaagcacctacgtagcactcagcacatgtagtgaaggaactgagtataagggcagcaggtgtatgtacctcgtcccttcaccattacataacttactcaccatgctcaaatgtttgtcaatcactgggcctaataggtgtgatgagaaattagagaatgtatgatagaaacctatgtttcaaaaatctgttggaaaacaaaaattttaaagtatacttaacatactcagttaagctttgtgattagtataggcagaaatagacaatattggaaaatatagtatttattcagaaagatgttttaaaatatagaagccatgcaattgccttgaggcattaaaagtaattttataaattgctccaggctggaggaatacagtaataaagcaggtcaaattattaagataaatgaagtagttcattgtttattacattaagacaaatgtttttaagatagaactaaacaacgtcatagtagagataattacaaagatagaatagtatagaatgcaatgcatagtctttgcttgtggagcagagtcagtcctgttagggagggcctcaccagtaaagtatgttatcactgcagtgagctaagggatggatacagtcacatcaggggtgtgtgctgatgggcagaatagaggtgggggaagcggtgaactcgcgaaggtccatatgctgcaccagcgctagacaagggacgctgttacacttgaaatcagttactgagctcttttgtaggatgtggcactgatcgaacgccttccagaggcactgcctaaggatttatagcttcatcatcgaaatattctgttggctgttttttgatagcccctttggctgaagaatctgcataattatcattgtgatttctcttcttcttataattaaacttatgtagcgagaaaatgtcattgaatataaacactgtttgattacgaagaatgagaatggagaatacaacctcagcgggactaagaggaacttcagtaaccttaaggaccttttgaattgctaccagatggaaactgtgcgctcagacagtatcatcttccagtttaccaaatgctgccccccaaagccaaaaggtagcaacaactctccagttactctagtcctagtctgcacgtagtgggcagtgatttgaaaagaagtaggcaaaaggcagggctgtgtgagagcaagttgatctttctcttgtgctttttggtacatgtagcctgagcgtgcgtgactggaagcgcctttctaaggtgttctaaagataattgcttcgaacttgtcagccatttgcttatgaaacttcctaactctactgccaaattcctgcatgttatatctttcatatatgtttttaggatttttaatgtttcttgtttttaaaatgaaattgcaagattgtaaatctctttttaaaataatttctttaaaattcccagaaaataaattctgctaagaagtgattgtaagtttgaatgtgtgtgttagctagtaagaatatttccaccagagttgaatagtaaagttcctagtataactaagcagccattgagagattctaagacacagagcacactcatgtcacttatctggagaggtcatagttttgctgtgctttgcttatatgcagacctacccacatatgaaacagatacgttgtgttttttcccccagataaatcaaaccttctcgtcttcagaacaaatggtatttctgatgttcagatctcaccaacattacagaggcataataatgtgaatcaaatggtgtttcacaaaatcaggaatgaagatttaatatttgtaagccaatcttgataattgggtggtttctttttttttttgtccctttaaagcagtgtcttttaaaatttcttagttgataattagattcatgttatagttgaaattttattataatttgcatttcaaaatttatcatttataaaattcataaatgttaggaaatatgccagtcttacagcataaattagcagaattaataatagagttatggtctcttttcagaagtttaaaaatattcctttgggaaatttaaaagctaaaataacctgtcttagttcccatgtatgcaagcgagtaaggggaattctgtggattgtctttaaggacttgaaaacaaaatagtctgtaggtgacggcttgactagtgtgtggtgtgagagggcatgtctttgtatcatagaggttagagtgagaagcattacaaagaaagggctgatcctaggtttgtccgagggcgcgacttagaagtgagatttatctcggaatagagctggaacctacaagagtgtgcatctagtgtatagagagtgaagtgtctgcctactcgcaagaggaaaaacattaatcttgtctgtttcaattgatttagtgaaaagaagaagaggagtttataagctgttgcgtgtaggctttgttagatcccttacacgatctgagaaacactaagccagtacgttgaagacggtgccatagacgcttggagaagcacatgcagagcttttggaaagcccactcgggtctaggaacatagttccagcccttgggggagaagcagacatatgaacagctttaggacatccttggctccatatggagttgagggcgattctggactatatgaggcctttcctcaaaaacaaaacaaaataaaaaacaaacaacaaccaaaaaggaaagagagaaagagagatgtttccttaactcacattttccaggattcccatagataaaccactccaaaaataagcttttaattaaaaaaattaaaacatacagggaagccacccaaaattaagtagaggtcatcaaaccaaacattaaacttaaacttctagtaattttatataattttcaagtatagaccataaaatgtaggtatctttaaagagggcttgaaaaacagcaaaatgaaaacatttaaggtgtgtaacttaaagacagaattccaggaaagaaggaatagttgtgtaaaaacctactgttgtacttgccgcttagtagacagtgtagaaagcaggttcctttcccgcccctgacctgagactgagggaattggaaagcaaccgtggtgtagctcagcgatagataggggttgtctagtgtgtacaaagttccaactttagccacagcatctcaaatgtaacagcaaaccccagaatttttaaatgaagcatattggcttatgcctgccacgcgtgtgctcaggagactgaggtagggagatagtacactggaggctggcttggggttcaatagtgaattccccagcctcagcctgagaaacagtccacacaagggagatggagaaggacagagggagagggacagagacagagagagtgggtggaactagagaggggaggaactgcagaatgcgagggcattgcttttcaggtgtgacagaagcagagagcagccggggaagttgacagttgaagtgctgtgtggtggagcagcttcaggatgcaggccttcagcagttattctgggcagattcatgataaatgctagtactcagagtggtggtggtagatggtcatctagtttatttcaggctttggtacgtccatgtatttactcacttattaatcaaagcagttctacaggacattcacattattcctcattatgtgaagagttcaaggccagcctgggccacacaggaaaaagaaagagagatgtgggagagggaggaacggggcagtgaggacagcccaagtagcagaagcacacagggattcattctgtagccttctgaagggcagctggtgagtggtcagagacaaatcgggctcctgcctccacactgtcctgcctttgtaccatatgaggaggacagcctaggaaggaccatgtgtcatcaaatttaggtaaaggctgactcgttaaggagtgcaatagttgtagccattgaaggagtcatgaaagtacagtagtcaaaacatattttattaatccttggttttaattattacttaaggaagaagagtagagaatttcgaacctcaaatttaggttcagttttaaaatatttatccttttaaaaaacatttttgtcattgaatatgtttcctattctctaattccttacttcatccatctttgttcacttcccactttcctttttttttttcttttaaagaatgaaagtcttggccaaggtacttttacaaaaatttttaaaggtgtaagaagagaagttggagattatggtcaactgcacaaaacggaagttcttttgaaagtcctagataaagcacataggaactattcagaggtgtgtacgttggttggatccttcacgtggctttttacactctgcaagtgtatgtattcataagcacattagatgcatgtgagacttcaaaattatacaattgtatgctttcattgcatatatcaattatgcataagataggtttcattatgatccatttacacacacacacacaatatatttcgagcgtttagtctgttaccttctcatgtctccctcccagtgatcctctttctcattccagctaacgtctgttctgctgtttcatctttgagtgacctggtgagctttattcgggttgcttacgtgagtgtgggtgacggttgatttacagggatatgctcgccttaccattaaagcagtgtgtctccatcccctgacaaccagtacactccttagggcgtggtagtcacgtgagctcctcctccctccacggaaggaagagtgttgagaggcctcgtcttgtgtatacatggccaggtaaacacagctgctttaagttcacgagtgcaccacccatgtgaagcccagagtgcttgttcataccacccttcctccggcgggcacacgatttctcctacagtggtccttgtagggcatatatattacttactttcccattgccgtggtaaacactgcaaccaaaagcaaattataaaggtgtttattttcacctgcaattccaaaaggataagagttcatcataacagagcaggcgtgacctggtgacaggaggaacagcagtgagaactggaagtgtgaagcaatggtagccttccaagaccatcctccatgagctccctcctctagcatcatctccccaaagcaccagcaacaaaacctaagtgtttggatacgtaaccatataggggacattgcttactcagtcacagtgggtgatctacatgtcttatttatggctggaatttgagtcacttaatctcagtacttggacaagctatcagtctctgaggtcactgctgaccactgcagaaagaagctagttaggaccaaggctgacggcaacgctggtttgtgcgcagagaccgttgtgttcggggcagtgggatggagagcccgtgctcatgtgaccgacagcagcagtagctgcactgctcaggcctacgacctccccagtcacaaactgggccagctttacggttccagacctgaattactccagcaaagcaggtctcaaatctaactaaaacgcaacctgtcaaaagacctgtcaccatcgagctgttaggggcatcctgtctggctgattgctgtgtacaggagccatagctgcgtacaggaagactgtttgtgacagttttgacctagcaactagccccgcgagggctgcagaccagggaggaagcttccagcccagttctgcatgatttatttatgtcctgtgactcagatgtgtggcatcttcagcaacaggctcttacagtctagcctggtgcacaatcagtagccatggtaattgtgtgtatcgtcttgagggcctcaggcctcactggtcaaccatgtgtaaggaggtatcccacccctggtgctaggattaccacttcccaacccatggcttctgggaacagctttatctatagtacaagatccctctgtccagactcctgtggtttttagtttagttttggttagcttacagatacctgatttacttacggattttcacacattagtttttcttgactgtcccctccccttccggcccctcctcccctccatctttcagtcttttcatttctagccttcccttctacttttaaatctatacattctgttaccccctcttgcctctcatgagctctttgcttatatttagactctatacatacatgtacattcacatgcataacaattagaaggtagggttcatacaaaagagaacatgtggtatttatttctttgagccaaactgagttacctcacttaatactggtttttttttccagttctgtctgttttctttcaaatgaaatgattttcttttctttatgactaaatgatatgtcattgtgtatatgtattttcattatccagttgtcagttaatgggccttgaggctgattccatttccttgctgttgtgaatatagcaacaatatgtatggatgtgtagggatctctatagtagggtacacagtccttcgggtttaagctcagaagcagtatagccggtcacgtggaagttctgtctttaggcgttatgtgtggagtttatgtaggtgtgtgtgctagagatcaatactgggtgtctttattcctctccaccttacttgttttagaatgtatttattctatacataatttcatgcatatataatgcacttggttagagtgctgttgagggcacccgactcgattctataaaatatctataaaatagaatattgccctcagcagcagtcgctatccagaaatgaccctcagtgagaagagagcagtcctcagactgtaaaccgtctccccacaagcactaatcactttaagaagtaaaggagcactgacagtctgtatgtgtggagcattagttgtcatgggtatgtggaaggaaaaaggaaaacccaccctggactcctgggtggcgctgggggaggaggaacttaaaatgggaatggagagtgaagaggagcggagagcacttctggcaaagggcagactgcaggagagtgctaaagtgatgacgaaagggtctgtgtcccaggaggctgagtgtgcatctgcacagcaaagcagaccagcttctttgagagaaaaagagtaaaagaaaggagtgaggaaaaatattcctgcagagcagggacaagctggcctgctgatgatattgggtattaaacaaagatggttagcagagaaaggcctggatgggaatacacagagtggaaactgactggccaggcacttcatccccttttcagctcctgtcaaaattgtgccttcttttttttagaggagcatcgatgactacatgatgaggagactacagaacatttgagaattttattttttctataaattttatccttagggtttatttagttatttctttttaatttctttattttttactttatgtcatggttgttttgcatgtatgtatgtctgtgtaccatatacgtgcatagtgtctgtggaagtcagaagagggtataggatcctttgaaactagagttacaaagcagtggttaatggccctgtgggtgccaggagccatctttccagcctaaaattagtagaatttttaaaataacattaatgcattacttgctttcagtgttgtgttataggtatagttaaatctttacttatactgaggctactccctttaaatgtagctacttgagccttacagactctccacggtctcatctacggaagaataagcttggagagcaccaaactaaaaattccccattgtccagccgagagtaggacacacgctggttctcttaagtcaggggtatctttctgagttctgtacttacagactctttggacagacattccttcacgtttcttgtctccctttgccccctctagtctttcttcgaagcagcaagcatgatgagtcagctttctcacaagcatttggttttgaattatggtgtctgtgtctgtggagaggagagtaagtaaagccagctgcttgtctttgtcaatgtcatagcctgtctcagaatccttctcatttagggctacaataggtgtcagcaaaaccttggaattacagatgttgttgaacttgaaagcactgtgggactgttcagttatatcttgtaaaacaaaggaactggtgtttaaagctaaaatgtagaatagagttaatatgtcttactaaagcccaggtgatggatgaggattacagtaaacaaatacaagcttttgtgtgcacatagcaatacagattatgggtgactcgtgtaaccctggagcaactggtcctttcagtactaactgatttggagttatgaaaacaaagcatatatgaattattaatgaaactaaagtgactgaatattggcactaggtaggttccccagttatgctggagtatgtatatttacactatataataagtagcatgttatatataaaattatatgttaggtatacattgtttagcatcttacctcttactgttgtgaataagccaaaaacaaaagtacaataaagtgtttattgtttccctgatgttagtacagtttgtttaatttgatttatttgcctgttgtatccacaagtaacctaagtactttgacattttgagttatgcatttttaactggatgtatacgtgagctttatcattacttgtattttaatgcagacattctggttcaagaatttgtaaaatttggatcactggatacatacctgaagaagaacaaaaattccataaatatattatggaaacttggagtggctaagcagttggcatgggccatgcattttctagtaagtgattcctgaattctttaacaaactaaaactccccgttctgttttgtaaaagtactgtacatatcttaacctggcaaccagaaggaagtcttggaatgagtgtcaagtcattcagtgtgttaggcattgaaagggatgggtatacacatggaggtcttgcatcagctttgaaagggttggttatgcacatggaggtactacatcagctctgaaagggatggtatgcacatggaggtattgcatgagctctgaaagtcagcgctgcctccactaacctcctgcaactaccgtagacacccatagtttatatcacttgagtttatagatgcatattgtgctactgcaatagcagaaagcaggctgcggtatttgtaggcattgaacagtgtacagtgagaaagcagtattggcaggtacacactgccagagtgccttccagttattagtgtatgtttactgaactggaagttgtttttcctaatgtcagctaccacctagaagtgcttatcatttagagtctcctttgaaaagtaatgctcatttctttgtgggtatagattactgcatcagttaaagaaactgaagacttccttttactgtctaaagtacactccacatcagtattaactgtgctgtgttttgtcctctttaaatctgtactgtagttttgggcatattatatgcacacatatttgtatattgatatttgaatgcatgtgcatttaactttaataggaagaaaaatcccttattcatgggaatgtgtgtgctaaaaatatcctgcttatcagagaagaagacaggagaacggggaacccacctttcatcaaacttagtgatcctggcattagcattacagttctaccgaaggacagtaagttctgtaccggctgccctcagcattcttaaatgttgtttgggtggtaccacgaaaatcatgttaattttcctttcattctagtttattgctgttcttgcttactaatgacatttaactactacttttagtaatttaaactgttgtggttaaattgtgactatgttcatttctccttttgtaaaaaagtacattactgggctggagagatggctccgaggttaaaagcactgactgctcttccagaggtcctgagttcagttcccagaaaccacatggtggctcacaaccatctgtaatgggatcagataccctcttctggtgtgtctgaagatagctacagtgtactcttataaataaaataaataaatatttttttagaagtgttctaccatacactgaagttatgcttctgtgcatctatctgtatggaggaggcctgcgtgtggcacagcacatgtgtgcagtcagagggtaactagtgggaggtagccctctccttccaccatgaggccttagggttgcacttctattcttgagcttggctgcaaacacctttatccacttaagccatattgctggctgtatcttaactaattttttggctgaactttctaaattaagaatccatattaatcagactttgtgcattggtgtataatattctggtttagccaatgctacttaactttgatagctggctgaaaaggacacgcatcatcggacagtagtgcagaaaggaaagcctcacagggatttttagatctgcatttgaggaaattgacctttcagaatgagaagttaaattgaaaaaaaattatatagtaaaggagagaggaactaatgaactatttaacctcctccatatgtaggaaaataatctatattgctttaccagcaggtagaatagtatcctcattttcttatctttttctctttatcagagtcctaacagagagggttatactgcttcttccttcctttgcagtggtgttcaggactactgaaactttatttgggaaattccatgatttgaacattacccagtctgccaattccatactgagactgtttgatataatttaatcatttgtctattgtaatgatacctgttgggccttgcttatctgccagtcacagtgacctctgctgctaagttgttaaaacacccatcaacgatgtaacattacttatatgagatatgtgcacacacacacacacacacacacacacacacacacacacactctgaatattgagagtaaatcttgcatgtttgtttctgtggtagagagaggcaggactaatgggaaggtggtggaagtggtgcccagtgagacactttggtttaatggaaagaagtttagttgatctaaatcattacacgggatactgattctgacaacattcttaaaactatgtctctgtgggaaattccctcatttttgacgatctgaattgtcaaagctgagttactgaagtaggattttaaggttcagccagcccttagacttagtaaacttaagccagtcctgtacagctccgaaagacttgattattcaagtaagtttggaactcttcacatatagaataatggttgtggagcttaattaacgatagtttgttcctgttgtttccaagttcttcaggagagaataccatgggtacctcctgaatgcattgagaatcctaaaaatctcaatctggcaacagacaagtggagcttcgggaccactctgtgggagatctgcagtggaggagataagcccctgagtgctctggattctcaaagagtaagttcatgtgggctgacgggagaggcaccccgattccttggggctcttccatggtgtgttcctggcccttctaattgtgaaaagaactcgaagtaacagcactgtggagtgtgtcttaccatttggccctttcattatagaagctgcagttctatgaagataagcatcagcttcctgcacccaagtggacagagttagcaaaccttataaataattgcatggactatgagccagatttcaggcctgctttcagagctgtcatccgtgatcttaacagcctgtttactccaggtgaggactggtggggccgtctccccgaccactgactttctatctctcttgctttaactggatagtttctcattttttagctccatctgagacagtctttgatgtcttgccgtatatatgtcctacatgactgggcagtctttattttttaaaaagatattcttgccgattataacctaattttatttacttgtttattttgtgaacaagaaaacttaaccacagaatttattatctgtgtctaaaacaagagttttttttaattcattgcatttttagttaatgagaagcaagtttacctgaccacacatgttactcgggctacatggagtttataacaagcccccctttgttttttctagttcccatctattttgtaattgacttgttagtgtaaacgctagataggcttatttttgtatgtccctacatctggagtgctgaaatcaaggcacagctgccccacagctagccgttaggacttacctctcactgcagcaattgagtaggacctcactttgtgaatagcctgtttaggaaaacagtattttaccttttgaaaaaaaatctatgttgaaagtctgggtaataattaaaggcccctatgaatataatctaaataattttgcatttcccgtgttatttagtattctaaaatcgttttgtttcttaccttgaatatcagttttgcctagagaatgtatctgaccatttaatatgtgtcattccttattcctacagattatgaactactaacagaaaatgacatgctaccaaacatgagaataggtgccctagggttttctggtgcttttgaagacagggaccctacacagtttgaagagagacacttgaagtttctacagcagcttggcaaagtaagctgtcataagttttcaaatagaatataatcagacattgtgttttggaaacaaaaaggctttggactagagttactaaatatacttttcacaaaaaaaatgtaaggggttatttgtagagaaaaaaaagcttatttgttgaatattagagaattttccggttaaataacgctgtactgaagaatacttcaggtcctttaacatgcagtgcacattcaacatcttttaagaggatagatataaactaaggagtacatcccaaactgaaggtactctgcgtctctcgcttggaaggagaagttagtagttcagagtaagttagggtaagagagaagggagcatacagcattctgtttgctttccaacttcatcttgggagaaatagtctgagtgcttagagcataggaccttgaatgaccatgttcactaacagaggttccataaaaaggttgcacactcgtacatagcctgtattatacagtctatactgtgtaacaagatgagaaaagccacagtgcttagcccgcccgttgtggtgatatgctctcttccttgtctgtttaccgcgatctataccatatctcagtatgaattggattttggcatagatagaacatgaaggcttcactgagacctttacctaagtgagaagtttcagttgaatgttcctaaaactaagcactgagggttacggtaaagttagcctaactgtgctaatcattgactcttcctttttctgtggaatactcttgggaatatttgaggcatatagccattcagagagggaaagttctggagttattcttgttcttataatggtgccacccttgtgaccagttaacctttaccactctgtataagacactaccgtataagacattagggttaggcctccgttgtataactctgtgggccgcacaatactcaggccgtaacaacccttgttcactggcagtagagttaaagtgcagtgagatagacaaaaggttaccggaagtcagttatagagacttaccacagctcctagtgtaccctgatttgtccttaggaactagtgttcaccacttgtttatcttttccaagagtactccttcatctcaaggaggttgtttataggcatactacccagtttttaaaataatacttccatttattgctccaaaagttgtctaacagaagctgggaattctttctactgattctagcagccagcattttctgcatatttagaaattaatatcaagttgtcttggaaacgtttggcttccaccctaatggctgtgttgttagggtaacttcgggagtgtggagatgtgccgctatgacccgctgcaggacaacactggcgaggtggtcgctgtgaagaaactccagcacagcactgaagagcacctccgagactttgagagggagatcgagatcctgaaatccttgcagcatgacaacatcgtcaagtacaagggagtgtgctacagtgcgggtatgttgccaggcacacttgtctgaacttgacagcgtgtctttgtcatccagctagtatattagtcagtgcccgagagcgagcgagccttggagattgtgcagggagatctggggctgtaactacaacagtatttccgctggttggttaatcatccttctcaccactcccttaaggaagaagtgttaacttttttaacaaaattaatttccttttataatctattaaaatgtttttatattagatacttcttataattgaaaaaaattccttaaccgcttatttagatttgtaaaaataattaaaggaggtttaagaatatttataaagcttctttaaaaatttggattgaaaacctgtattcctaactattatatcacctttaatttaacttttatcatcatggacccagattttgtatatacttaaatcagttacatatagcttttttcctagtatttaatcagtaaaatacagcacaagaaaacattgtgttccttttgtatttaaaaggtcggcgcaacctaagattaattatggaatatttaccatatggaagtttacgagactatctccaaaaacataaagaacggatagatcacaaaaaacttcttcaatacacatctcagatatgcaaggtacccaccatcccacatgtctcttatagatgaaataaacatggtgaactaactcaaatcatacaaacttattcttaactaataaagagaacttgtaggaattcagccatataaattatatttatatgactactaaaagaaaaatgtgtcttttggttatagggcatggaatatcttggtacaaaaaggtatatccacagggacctggcaacaaggaacatattggtggaaaatgagaacagggttaaaataggagacttcggattaaccaaagtcttgccgcaggacaaagaatactacaaagtaaaggagccaggggaaagccccatattctggtgagtacggcggcttttggtgtaatggaatgagacgttagagggcttgcttcaaacttcaatcttactgttcctaaatgtataatatttaatcatgttcagtttagcacttttcccaataatagcaatatttatcctatgctttgtattgagctaatttgtattgagctaaatgcatctcatgtattatctcaaaatgagtagttgtgagccacctggcatgggctctgggaatggaaccgggtcctctggggattgaactgggtcctctgggaatggaaccaggtcctctggggattgaactgggtcctctgggaatggaactgggtcctctggaagagccgtatgtggtctcagctgctgagccagctctccagcctctcagggttccttattgcaacccacagagaatgtatatttctatgagtattagagatgcaacagtcctaacctgaaaacccagaaccaaaaggcactaagcatgaggcatctcaggtgctgacgtggttctcagcctggatttgcagtagggaagcttcactcacagacattttatgtaagacaatgtcccagaagctgaaaagctctgagaccagaagcacttctcatctcaagcatttctgacaaggcctgtggctccatttactcaggagggaacttactgtacatataagctaagcagcttgcccgaggtgtatgactaataaattgtagcactgggattcaaactcagtctgatcttagcgtttacactttcagtctttctagatcatgataatgtaataacctggcattaattaaatactgaatttatagtagttaggcattagaagtaatttttgacctttaactaaaatggccaggaacattcataacttattttacttatttaaatattttatgagcattaattatacataagagtaggtgtcatggcagttttcgtacattcatgggatgtattcggtcacatttaccctctgcctcaccctcacccccagctgcctctgttatggactgggctgcttgtttccatgacaacccaggggattggttaggctttgattataggaggataggtgagggtttggactttctcagcagttcctctgcttaagatattgatgtgagcccataagctcctctctgaatttaatgatggagtgccaggcccagctttatgtgagtaatcagagctgctatgagttcaaaagaggggctgctgctgaccaccgggaacaaacttcttacactcaggctgacagcagcacttgtgtcccggcataaacagagttctgtagaaggtgatgtaatggacccaggcccattcaccagaggaatggcagtagcacacacgcacacacgcacacacacacacacacacacacacaaagtttcagtgtgttcatgtaggatgcattttgtcttctaggaatgccacaatgaacttctttttgttttatataccattccaatagaatttctggtttatttctctgctgaagtaatgctattaagcagtattgtatgaatcaaaggatggtgtttaaaatttaggaagagtaatacaaagaatacaactgtcaatttataagtattgtctaaatttttccagttatttaaaaaatatcagtttgctagcgctaacttcacgggtcatccatatttctgggttatgtttatttaatgctctaaatttacagctcatctttaaactgttctgaaagaattttggttaaaatatttagaataagtgtttccacataagtttatcggcattataactgtgtgttaaaggaagaggttccttcccctctactttagagatgtgatgattcacatcactgtaaggtacaggtgtgtataggtgagggctttctcaggaggactctgcttactcaggaaacaaggccaataattgacaagtgggacttcatgaagttaaaattattttccttgtcttctgtgtggacaaggaaacaatcaagttaaaagcaccctccagagtaggagagaatcgtggctagctgtacatctgacagagaattagtatctagaatatacagacgactaacacactaaccgccaagaaagcaacccctcactaagcccttgcaagggagattgagtgaatggcagcaggctaggtgtggtgagtagtagacctagaaagagactgagccctgccctgacttgaatgtcccgtaccatcagaaaacacagatatctcattactattcattagtattcattactattcactagtaacgattgctactgttatagtagcaaaattacagttatgaagcagcagtgaacataatgttttggttggggtcaccacatcgtgaggaactgttcttaaggatcagattaggaaagatgagaagcactggtttaggtgaatacatcagtagtcatggcaacagacatacggtgttcattttacatctttataaatggaaacacagagaaaactgtatttcagtagatggaagattggctacaacaaaatacatttttataattcctggataagtaactaaaacgtatacaatgagccagtactaaaattatctattcttaggtgaaaatgtattttttttctcactagtattgaaaataaagaataaaaccaacttgactttcagaaatggatttagtagctaatctgtagttactcttttctcttcatttctgggaagaaaaaaacaaaacagttttgaattaattaaaatgtttctattgcactattgtagtgatactttatttgaactgatctattcagaacttggagaaacagattgtcactcatttcaaattaagtacaatgttttaataataccttttattatatataattaaatcaagttcaaaagattaagggttctttgcctttaaaaaaaaattgttgttgtttagaatagccatcctgtaacccatctgcaacaccatacctatttaccccctgacccccaaaagactcactttctaacagagaaagtcttggctcagttttcttcctggccaagaactgtcttttgttcaagtgtgtgtgtgtgtgtgtgtgtgtgtgtgtgtgtgtgtgtgtgtgtgtgtgtgtgttatgtgaaaactcaaagttagcatcaggttttcttttctttttttgttttttgtttttgttttttccgagacagggtttctctgtgtagccctggctgtcctggaactcactttgtagaccagactggccttgaactcagaaatccgcctgcctctgctgggataaaaggcgtgtgccaccaagcccggctaggttttattttctattcatctttccactttagtttttgagataagactaaacacagaacttgccatttttgccagcaagtacccagatctgcctattttcttgtccctcagtgcttgggttataggttgctctccctggctttttacatgagctggggatccgaactcagtcctcatgccttttacagtgatcaccttacccacagagtcatacctgcaagtgaaatattatttttgaaaaactagcagtagtaggtcagtgaagtggctcacctataaaggtgcttgctgtattgacttgagttaatccccagatccaggtagaaagtggaaggagagacccgaatcttcacggttgtcttctgacctccataggcacacatgctctgtacacgcatccccttcatgtgcaacgacacaacagcaaatgcagacatactggtaggagcacacagaaggtccagtgcgtggttcctagcatcagcaatccagaatcgcagagaatatgtgcttctgtaggcgtcatgaagccagtgagacgtgctgcagagcccgtcctgtgtgacgctctttcctgatgtttaaatgcatgccttagttttcttttggtcatggtaaaaaccaccagacaatataagctttggcacctggcttcctgagtatgtggagacataagtcccgagggcgggcagttaatatgaacatgagtaagacacattgttcatcgagtctttccacatcgtcgtgttcttccatggaggaaggtggaagggcagcgccatgcagcctgttctggagttcctgactctgattctccactttctctaaggagccccttcctatactacattgaccattgagtttcaacacctgagttttggagagaacacagtcaaattctagcaaacaaaattaagatatgaaagaaatcacacgcagtttttaaccatagaagttagtcatggtttgttttttttaaagcttgattttatttaaaaataaatctttgtcctccttaatactttaattattcaagatgctgttttgctttcatctcttggcatgttccagcatgttttaggggttggtactaagagcttgaggaaaagtgcttctacttcagtattgaaaaaaaatgttggggctggagagaggatggctcagtggttaagagcacttagtgctcttccagaggttctgagttcaattcccagcaaccatgtggtggctcacaaccatctgtaatgggatctgatgccctcttctggtgtgtctaaagacagagacattgtactcatgtacataaaataagtctttaaaaagaaaaagaaatgttgaagcagaatttcaccctacagggaaggcgtgtgctgttcttactacagatgtcatttgggcagtctgtgcatattggttactctgcagtagtcataggctgtggcctacgactgtaatgatagagagagtaagctaggagaccactctgaaaagacatggtggcttatttcacacagcagtgagagagttaaaaataattcctgggccaaccagaggctcagcagcaggcctgagttaggttccccaggatctacatggtggaagaaaacataaactcgtgggttgtctctgacctccacacatgtgcaaataaacaaacacatgtacacataaatacaaaaaatgtaaaatatctctaaaaattcctaagaatcctttcttgggtatagattgtgattccatttattgtataatcaaagccaaacactcagcaggatttgggaagatggagttctgtttacctgcaggtatttaatgtggaaacgagatatattagagccaagagaatggactgtgtttaggagactttggaagaagcatgggcaatatcatctataggaaacacggtagcatgagagggagggattaaatgatagaactgcaggaaactacatttagcagagagaaaagaaatgttggcagaaatacaattaaggccaacccattctctcaactcaaaacccgtctatgaaagcaggagacagaaaggacctattgttgaataaggattaagtatgtgtgtgctgttgcatttaaacaatccccgtgtaataagagatctccgagatggaaagaaatcttacatttttctgtactcaggcagaaacagcccactgcatacacgtttactgcatggcattattcctccagtgaaaggactgaaccgcactgcttgtcacacatagttcatcctaaatcccctgggtgaccgtgtgactccctgcgccgggtactggtctcaccatactgtgacatgggctagcacttggaacgaggctctggccgacttgggttcctcccctccccaagaaaccagaagaaaggggcattgccacctttgatgatgatttccaaaagacagttcctaggtggttgctaattatgtttctggatcataaaactgacagtggcttttaagcaagagcatttcaaagagacataaaatgtacaagttccctaaatactacacaaaaaaaggagggaaaaagtcttcctcttaagacccacagagaaaagtgagccttttcctgacttgatttatctttgtctaagtaaaagagcattaggtaatgaatgtacctgggggttggcaatatgtaaccaagaaattaattacaaagagcgctttgctaaaaacaaaacaaaataaaagccctaaaactagaaaacaaaaacataagaacaggatggctgtcatctcagtacttgagaggctaaggctggaatttgagccaagctgggtacatagaaaaacctgtccagctttttgaaaggagggagaaaagcactttaggatataggataatagcattgtcttaaggagattacattttgctaatagaataaaaagctattaaaggcgtggtggcacacacctttagtcccagcccttgggaggcagaggcaggtagatttctgagttcgaggccagcctgatctacagagtgagttccaggacaaccagggctacacagataaaccctgtctcaaaaaaaaacaaacaaacaaaaaaaaacaaaaaagctaagtacacagattccgtactggttgcatgtttgtgtagtacaactgtaagtctagatgtgcaataagcagcccgattagtgagcttgactacttagggaaggacttgtgcaagtaaaacttaaattaggttttgaaggaaaggtnnnnnnnnnnnnnnnnnnnnnnnnnnnnnnnnnnnnnnnnnnnnnnnnnnnnnnnnnnnnnnnnnnnnnnnnnnnnnnnnnnnnnnnnnnnnnnnnnnnnnnnnnnnnnnnnnnnnnnnnnnnnnnnnnnnnnnnnnnnnnnnnnnnngtttctgtgtagtcctggctatcctagaacttgactggtcttgaactcacagagagtgacctgcctctaaggcttgttcatgttttctgtctagccagtcaaacaggtctctgtagctatttctatactaaagacatgcttgtccatggaactacaaaactcatggtccactgcccacctctgactgggataccactttcctgtggctttgtattttctgtgttctcttccataatcactccctttctgatttttttttagatttatttatttataaaccttatgtatataggtgcttgtatgtacatttacacaccagaagagggcagcagactccataggactatggttatagatggttgtgaaccaccatgtaggtgccaggaattgaactcaggacttctggaagagcagccagtgctcttaagccctgagccatctcttcagcccctcccctcctgattctcaaggcttcaagttacatttctggctagaaactatatttcctccacctatttttaatctggatttctttaaaagaacaacttaagagcatctcgcatttcaggtcttagaaaaacttatcatttaacacctggtgtgccaacaaaagaaaaacaatgtgtttaggtttttgtgtgtcagacgtctcgggaccaggctttctgaattgttaggaggacccactgtcagcatgtgtcagattcatagctgtcgttcatcactggggagaacagcagagcaaaggccagatgggaaaggtctgtggagcagataacaggccttctgtcccctttgttcccctgggtgtttgtcatttgtttgtttccccctccaatataacgtgtcattccatgaagtaactcttctaaatgattgcaatattgcaggtacgcacctgaatccttgacggagagcaagttttctgtggcctcagatgtgtggagctttggagtggttctatacgaacttttcacatacatcgagaagagtaaaagtccacccgtggtcagtgcgcttcttagtggcgtagctccccgagccctctcctgctgcttaacttttgttttaagcacaagaaaggcattatccaaagatgagtaacatgtttacaacctagtttaggaccctgttgttatttatttggggacaatattcaataatacccaacaaaataactacaaacaactaaattcagtgtatcctcttgtccattgtctctgtgactgtaacaaaatacatggtactgagtaaattcataaagaaaagcttgcagttgtggagattgaaactccattatcaagccaaggaccctttgggatctttacaacatggcagagaagcagaaagagaactaactgcaaaaacccatcacaaggcaaggcttcggctgagagccaggagggccagcattctgcttcctgtagagcagctcgctctcccaggaagtggaacccgcagggagcctggtgttatcccttacagagcccatcattccagcgctgccagggcccaggcctccagaacacctcagtggcatcgaagttacattgagtgtgcccgtacactttaggaagcattgcacaacctaaagtaaacttttggaagtacatatatatttctttcaatatagggaagtatgaaaaaaatagaaattattttaatgaaattactcatagataaccattttaatatagtaacattttctttcagacttatatataaaaatgaaactttagaaagaaatacctattgttttatatgactgagctttgtagcttcctgtgaagtcctgttaattattacatcgtttcataatatctcactttatctgtacttatctgtacttactcactgcaagtatgattttagttatccagtaccattctgacacaaagtcgcatatttctggataatcatttaccatttttatacataaataaatacttttgtttgtggctatcatgttagaagaagagtgtacttgttagtgagaagttatgagttagtaaatcgctgttgattgtttcaaaagaagagctgcatcaggctatgtattcacggcactgagagggccgaataattctctattcacattatatatttaatgaaatattaccaacctaatataaaaattcttatatctattttatcctaatttgcatttgttttattagtgtagtaattatttagcaagtcatttaaaactggtttctgtttcaggaatttatgcgaatgattggcaatgataaacaagggcaaatgattgtgttccatttgatagagctactgaagagcaacggaagattgccaaggccagaaggatgcccagatgaggtaacaagctttaaagtcattcattcattcttttgtgtgtctatataatgtgtgtgagtgtgtgtgtctctgtatgcatgtgtaagaaaaaggtgtgcgtgtatgtgtgggtccatctatgtatatatgtatggtttgtgtgagtattttgagtgtgtgtgtcttggtgtgtgtgtccctggaggtgggtgtacttggtatgggggtggggggttgggaggggaggtgtgactacaggcatacataccacagtgcacattgggatcagaggaaaaccttccagggttggttcttgccttctgccttgctgaaacaaactttctgttgtttctactgctgcactaagcccaccaggctggttggtcctcatgactgcctctcatgtcttagtgctggaattagagactagtgctgttttgctggctccttgcatggtcccagggactgactctcattaccaggctctgtgtacagtcctgtttgtctactgagccatctccctgatccaacaatttttttaatccacagtaattatccattttctttgttttattgagaacatacacagatttccttttcaaggtataaccgtagcattattattggcctacgtaaattaagatttccaaattcatgtcatcctgtaacaaccatggtactttgggtcactctcactttggtttcactttttcactgtacagatttatgtgatcatgacagagtgctggaacaacaatgtgagccagcgtccctccttcagggacctttcccttcgggtggatcaaatccgggacagtatagctgcgtgaaagagatggccttcactcagagaccaagcagacttccagaaccagaacaaagctctgtagccttgtgtctacacatccttatcatgatgctagctaggcagaagaaactgtgacgccgtctgctcaaagctttggaaacgccgtgcgtttgtttctacaccatctgtaaaaaccactgctcaagtctggcagcatgcttgtgggctgatgcatggagctcaccacagagtctctgcatctcctctggcagaagaagaaaatagacagttttcaactcagcttttttgagaaatggaaaaaattataatgtaaattttgcagtgtaggaaatacacagaacatacatgtacagtttttaccacgtggagtgtataatactttggcctcttgtgtgatttacatgagggctgatgtttgttaatgttttctaatttttccataggtgatctataataacttcatgatacaaattaaaatgctcagaaaattaaataccttttctttcttgctcatctttgctgctctgttagggcctgtagttccatgccactgtaaatatttttcaaagcaaaaggaacaaaggtctagttttacttgtataggaaatcttcctgaccctaaagaattttgaaatgggacaatcttacaaagacacagcacaatctattttcttatttgttttccttgtgtttatggtaaatgtgtttttaaatagaactgtctccaactttttctatgactataatgaatataatgaatccttttataattttgagattaagaatgccagaaatacttccctcccttgaactgttaactgccaatgagatgtttcaatccctaagacttgtcattatacattaaattgaagcataagccatacataatttgtaaaatgtacaagctctttaagatgctttctgggttggaacatggccaaagactgtgtgagaggcctccaggtttgccattacagctgtgagagaaacgtcctttcctcagcgtctcccagacagatgggaagggaagggtgtggggcacatgctgttcatcccattcaagaataccagcaggcgtgtgacgcacatctcgagatgagaagagagagcgtacatcttttcaaagtataaataattgttatcatccttcgtgctgctccctcttagacaatgtcatgtcaaaaataaaacaagatttttgtgtgttatttatacaagattttaaatatttggtaatttgtttaaaaattctgttttcagtggtgtgttctgtttttgaacgtggacttaaagagttttggttgcgctgaagagacgagcctctcacatcctttgagaattttagtaggtaacatatacagaaaccatctatggtggtgagactagtggattttgttttgttttgttttgttttttaatctaatatgtattttaatggaagtcagatttatttttatgtaatttctcagatctcaaggaagtaagtgtgtgtgtgtgtgtgtgtgtgagagagagagagagagagagagagagtttttagttctatagcatctaggatagaagtagtgtatcatataatacaattgatctgagatttttgtactaaaatttaacattttcataaaagactaacatttacttatttttaaaaatcgtaatataaactacattgttaggctttttaaaatatttgaattttacttttaaagaatcttgcatgcatattcttaagattgtagaatgagatgacagtctaactgtaaaattcaaagttgtgaaaagacttctcattgagagttcataatctttttagttttggtttgaatggtacacataaagaaattattcccatagttagaacttagtgccacatgagaagcaggtatcagatgtttcttcaagctaatatttcttagaaattaagcttttttcagaattttataattatgtaaatgtcagatgatggtattctataatcattagataatcccatactattgtgggtacttggttttagaacagcagttctcagccttcctaatgctgtggccctttcatgcagttcatgttttggtgacctccagccataaagtgattttcatggctacttcataactaatttttctgctgctatgaataacactgtaaatatctgtactttccgatggtcgtaggagacccctgtgaggtggccattcctctcccagaggggctgcgacccacaggttgagaaccactcctttagaaataaaaatttgtgatatttttatatatatatatatatatatatacacacacacactgctggtagcactgcaaaatttactctagcaaagtgccgtcttacagtcctaattttcctcctgaaagtgaatttttttacagttgtaacttctggtaaatatttaagttctaactaaacaattttattacataatagagatgaggaaatacctacatttctacatctgaggagccccccccccccgaacctggggtggactgtgtgctccatgtattgtcatagtaactacattattggacctttagcatgctctcacaagattggaaggttgctgtaatcgtattataggttattttcctttgtgtaatcacctagaccatcacacttgtatatatagatgaaactgtctcataaactcaagtgaatggtggtgtttatagctttttgctggatagtggtgtatctcagtgttggggtacctatagttttggattgcattaccgttatgacttaaggtgttgaatctttttttccagtgtatatttgaccatttacattttatgttttgagaactttctgttgggttcttgcctggatcatagaatttgtacataggtctgaattgtttatcagaaataaggttctcctgatgcaatctttggatccttagggtattgggtcatggaatctgtacaccggtctttctatttctattccttttgctatcattttattctatctcttgcttgcttactctggttaagcatttaatcttggataagggtaggaattgatgcccttgtcatatttatgattttagaggacatgctatcagttttccactattcagtataaatagggatatattgcctttcatattaaggcatgatcactctgtttcaggtgtcttcagggcttttatcaaaagaagttggattttgtcactttttatccacttattgtgcttaaagtattatatgtatatttacctatataggtataggtgtgtgtgtgcgctcgtgcatacaatgcaccatatgtccctggtgatcccagggtctagaagaaagtgtcatatcctctagaactggagttatagagagtttcatggcaacatgtgggaactaggtattgaacctagattctctgtatgagcagcaagtagtcttaaccactgatcctatattgtgattttaaatgttttattaattatttgataattatatacagtatattttgatcaaattcatccttaagtctctcttaccatccttgcccccttattcttctcccaagtccaggttgtattgcccaactacacctggagtgtggtaaacctaccaggggctacatcattaaacttcttcctctttcaacagctatcgagtgctaatagctcctcagcttgtagtggaaataccatgcccacctctatgctaggattttatctggcttgaacttgtgcaagtcttgtgtatgtgttgataatcaccatgagttcgtatgtgcatttgccctgttgtgttgggagaatactttttttttattcagtatgtattgaccagttgaggatttctgtgttaactgtcatctatagaaagaggaaacttctacttatgaggtcagagagatgtactgattcgtgcacatagcaataagttattagaagttattttaatactatgctcatttagcaaagaaacagtggtaggttctcctttagggcctaaagcctatttagctgagtcttcttggccctgttaacagtactattgatgggtcctatctcatggagtggactaatctaatcagaaggtggttggttgctcctgtaacatttgtgccattattgcactagtggatttatcttgtcaggacagttgtttttgtaatttgtaggagtcacagcagggtgagtctaatggttttcccccctctggtagcatggatatcaccttccagaaccatcaaacttcgcagagatgaagcctccgtttgagtacatgcttgatgtctcagtgttcacagttcaacatgtagagttcaacatgtaagagcaacaggatcttattgtcaggctgtggaggcgcacagtgattcatgggtggctgctttgaaacagaggagggaatcccctgtgggtttgatatataaaatgcagagtccgtcgttgcatcctaaggcaaggactggtacgtgtgaaccttaagaagtaccacccacagagggagaactacagactcacagaaggagctgggctacagtgggcacccagatgtgtctgtcttactgaccaacatcagttgtagccatcagcggagtgttcacacgtgccaaaagagctagatcaatggtctgtgctggagaaatgctcagagactagactccagcaagatgagtactgaagtaagtaagggttgaccgtggctttgagatcctgaaacttaaacttggcatgagaaaatcagtctcagaacagtaataagacaagcgaagaaaataaaaaggatacaaataggaaagaataaaaaatagtctctatttgcttatggcattatactatacttagaagaacgtctggtttctacaagaaaagtctagaatctgataagtgctttcaggcaaagtttcattatttaataccataatacacaggtcagtagcttttctatgtaccaacaataagctggctgataaagaaatgaaaaatatctattcataatagcttcacaaaaataacgatatccatgaataaatctaatgaacgggattaaagatctctgtaataaaataagacacaaaaatgggaattgaagaagacactagatgatggaaatgtcttctctgctgctgtattgacagaatattgtgaaggtgggtacagtatcaaaattagtcacatattcaatgcaattaccttcaagatctcaaaaacattactcaaagagcttggaagaaaactcacattcatatggaaacacaaagctaagagaacactgttggatagcatggtgcctaatctcaagttatactacagagcaatagtgacaaagatagcagggtcccaacacggagccagacgtgtgcaccacgggacagagaaaagaacccagaaataaacccccacagctgtaagcactgcttataacaaaggagaaaaaaaatcagagcaagggaacacacctctttcaacaatgggtgctggggaaactggcattggtacatagaagaatgagcctagatccatatctctcactttgcacaaataccaagtcaaaatggaacaaggacctaactgtaaagccttagtcactgcaactgccagagaaaacacaacaaaatgcaggcttaggcaagtgagttatggtagcacagtgaataccccaagagtctggaattgggaaattaaaacaaacaaaacctacatagcaaacaagactagcagcatagtgaaaagacagcatacacaattgaagggaatctttgctaggtatatatccgatagtaaaatattcaagacacacaaactgccatgattaagcaacacaaaaatatgtattgaatcaatgaatatgctaataccctgaatagacaggtctcaagagaagaaacaaagtggacaataaatagtttttaaaggtggtcaacatcgttagtcattagggaaatgctgagtaaaactacaccaagatactttctcgtccctgtcaagaatggctaatgtcacaaaagcactgccagtgtgtgaacactgccaaggacgtggggaaggaggaatccttagtcattgtaagtggtgatataaatgagcacggccaatgtggccatcaacatggtttctcaaaaaaacctaaaaaagatcaaccagtgagtgtagtggtgcatgcctttaatcccaacactggagagtcagagacgggtggatctcaatgagtttgaggccaacctggtctacatggtaagatccaggccagccagggctacatagtgagaccctgtgtggattgttggaggaagtgtatcactatcagggtgggcaatgagacccttctcctaaccacgtgggagccatttcttctagctgccttcagatgaagatgtagaactctcagctcctcctgtaccatgccagcatggatgctgccatgctcccaccttgatgataatgagcctgtaagccagctccaattaaatgttgtccttataagagttgccttggtcatgatgtctcttcacagcagtaaaatcctaactaagtcagaagttggtatcaggaaccagtggtatggctgtgataggcctgaccatgttcttgtttgagtgatgtggatttggggactttgtaaagtggtgcgacttaatgggccctattaccagaagcatggaagacagtgttcctgagtgtgttttgaaaggcagggacctaactcaagaggtttcagaggagtagacttttagtatgcagtctagagatatttttggtaatattttggtgaagaacgtggctgctttttcccattgtccgaagagtctgcctgaggcgaaggtaaaggaatttagattaattgctttgacaaaggaagtctaaacccagcctgctataaattctgttgtgtgattactaaagttcactcttttttaaaaaatctatttttatttttaattggatattttatttgcttatatttcaaatattatcccctttcctggcttcccctctgcaagctccctatcccatcccccccttaccctgcttctatgagggtgatcccctaaccatctacccaatcccacctcactgccctagcattcctctacactggggcatcaagccttcataggaccaagggcctcccctcccattgatgccagataaggccccttcagctccttcagtccttcccctaactcctccattggcgtccctgtgctccgtccaatagtcggctagtcagctatgagcatccacatctgtattggtcaggctctggcagagcctctcaggagacagctgtatcaggttcttattagcaagcatttcttggcatcagcaatagtgcctgggtttggtgtctgcatgtgagatggatccccaggtggggcagtctctggatggcctttccttctgtctctgtccactctttgtcccttcagataggagcaactctgggttaaaattttgcagatgggtgggtggctcaaccagggggccatgtctaatatctggatatggtctcaacacgttctccttcctctttgtggagtatttcagctaatgtcatccctgcggggtcctgggagcctcttggcatctgggaccttctctctgaccagttcttctaccttgtttgtgcattcatctacgctgctgctgctgctgctgctgctgctaaattcctttcctgatatcagaacccaacttcttcaagcttccagtatagacgagtttggaatgaagaccagtgcctctctaggaatcctctaagccttcagtgccagactgggctgctgaggcatctggcattgtggtctcagctctccaatgtaaagaccgccattgttggaccaccctgatggaactctgtaagccaatccaataaataccttttcaacagatagtcattctattggttcggttcctctatagaaccacaaccatataattgaatgctaattttaaaaataaaaattactttttttgattactgcagggacttctgcttcctccggctaaagacttgacgaaaagatctctttaaaaatgattcttcactcagcaccactgaataggataggaagagcaggggccattcttcaggatctgcttgctgtgttgaccaaagacattccttccctaacttttagccagcgccagcggcagattgtgtccttctgcagtttggtgagatttttttttttactcttttgcttaaagctttgttgggattagggactgttctttgaccctccttactgtaatgcctagatctgatgttagagttgcatttctttaactgatctgaaacttctgtccgtattaaaggtacattttcatttaaagctttgtggacctattcaaccatgacacaacataaatttgtttcaaaaatggttctcttctctctctttacaaaggtaaatgtgcagggtatattttgaaagcagttgaaaagcaaagcattttacaaatgcaccagaaacgtagatttgagtggaaaagaagttctgtcttaagacatagtgcagctgaagagaaacagaaacaagtctcactgaacagggtgttatagggcgtacctgcgaagaagacgagagaaatctttccatcgatgcttacccatcatttagtgagtgagaattatactttggaacctccaagtttttgctcaacttttagcattaaaatgatttcacatagagctggtgagatgactcggcagggaaatggtacctgagtaaaactcaaggccctgaaacaatgtgtctgtctactattacagtgcaatacaatgtgtctgtctactattacagcgcaatacaatgtgtctgtctactattacagcgcaatacaatgtgtctgtctactattacagcgcaatacaatgtgtctgtctactattacagcgcaatacaatgtgtctgtctactattacagcgcaatacaatgtgtctgtctactattacagcgcaatacaatgtgtctgtctgctattacagcgcaatacaatgtgtctgtctactattacagtgcaatacaatgtgtctgtctactattacagcgcaatacaatgtgtctgtctactattacagtgcaatacaatgtgtctgtctactattacagcgcaatacaatgtgtctgtttactattgcagtgcaatagcttgtgccaggggcatagttacttgcttaagttgctgagacaaatgagctggatgactgagaggaacccagtcgttatgggcatgagtcttctttttaatcatctagatagaatgataacatgccatattccatctaaacccagcttaagggctttcaatcatgacgaaacccaaatagatcgtttttcaaatacctacacggattatggcacctatacatagtctttaaaaaaatattcgacaaaataggagtcactaaatactaagattcttgttaccagcacacaacactacaaactacttgcaaatatcctctagtgtggttcagtcctgcacctacaagcagaaccgcaagaacatataagcagtaaattagatttagtaagcttttattaagcgagcatagttcctacgacagtttgtacatctctatcaccagtgatgtttgattaatcgttaaggtttaaaaatcaacaaaggggaggcacgcgacggccatctcttctttggtgcatcctatcacacagcacttatctgcaaagcctctgcgtttcctttgggaatgattcccccaaaataaacttctgaaggtattcattttgttcgtgcttttcttctgaagttgtacgctcttaacatagggcttgccactgtggtatgaaaacactcttgccttaggaagcaactccgtcttttcaaactgatagtcgggcagtgactgaggctcccaagtgtgtgttcctttcttctgagagacgcctgcagggactgttgagagacaatgggggaagaaagtcctatttatccaaatctcctactagatatgaatttagtattgcaaaactaaaatcagatacttatttaaaaaacattttaaataaaagttgaaaagtacagctattcaggggcaatttttttttttttttttttttttttttggtttttcgagacagggtttctctgtgtagccctggctgtcctggcactcacttcgtagaccaggctggcc

SEQ ID NO: 176 - DNA, 3629 bp, Mus musculus
cgggggaacaagatgtgaactgttttccctccccagaagaagaggccctttttttccctcccgcgaaggccaatgttctgaaaaaagctctagatgggaatggcctgccttacaatgacagaaatggaggcaacctccacatctcctgtacatcagaatggtgatattcctggaagtgctaattctgtgaagcagatagagccagtccttcaagtgtatctgtaccattctcttgggcaagctgaaggagagtatctgaagtttccaagtggagagtatgttgcagaagaaatttgtgtggctgcttctaaagcttgtggtattacgcctgtgtatcataatatgtttgcgttaatgagtgaaaccgaaaggatctggtacccacccaatcatgtcttccacatagacgagtcaaccaggcatgacatactctacaggataaggttctacttccctcattggtactgtagtggcagcagcagaacctacagatacggagtgtcccgtggggctgaagctcctctgcttgatgactttgtcatgtcttacctttttgttcagtggcggcatgattttgtccacggatggataaaagtacctgtgactcatgaaactcaggaagagtgtcttgggatggcggtgttagacatgatgagaatagctaaggagaaagaccagactccactggctgtctataactctgtcagctacaagacattcttaccaaagtgcgttcgagcgaagatccaagactatcacattttaacccggaagcgaatcaggtacagatttcgcagattcattcagcaattcagtcaatgtaaagccactgccaggaacctaaaacttaagtatcttataaacctggaaaccctgcagtctgccttctacacagaacagtttgaagtaaaagaatctgcaagaggtccttcaggtgaggagatttttgcaaccattataataactggaaacggtggaattcagtggtcaagagggaaacataaggaaagtgagacactgacagaacaggacgtacagttatattgtgatttccctgatattattgatgtcagtattaagcaagcaaaccaggaatgctcaaatgaaagtagaattgtaactgtccataaacaagatggtaaagttttggagatagaacttagctcattaaaagaagccttgtcattcgtgtcattaattgacgggtattacagactaactgcggatgcgcaccattacctctgcaaagaggtggctcccccagctgtgctcgagaacatacacagcaactgccacggcccaatatcaatggattttgccattagcaaactaaagaaggcgggtaaccagactggactatatgtgctacgatgcagccctaaggacttcaacaaatactttctgacctttgctgttgagcgagaaaatgtcattgaatataaacactgtttgattacgaagaatgagaatggagaatacaacctcagcgggactaataggaacttcagtaaccttaaggaccttttgaattgctaccagatggaaactgtgcgctcagacagtatcatcttccagtttaccaaatgctgccccccaaagccaaaagataaatcaaaccttctcgtcttcagaacaaatggtatttctgatgttcagatctcaccaacattacagaggcataataatgtgaatcaaatggtgtttcacaaaatcaggaatgaagatttaatatttaatgaaagtcttggccaaggtacttttacaaaaatttttaaaggtgtaagaagagaagttggagattatggtcaactgcacaaaacggaagttcttttgaaagtcctagataaagcacataggaactattcagagtctttcttcgaagcagcaagcatgatgagtcagctttctcacaagcatttggttttgaattatggtgtctgtgtctgtggagaggagaacattctggttcaagaatttgtaaaatttggatcactggatacatacctgaagaagaacaaaaattccataaatatattatggaaacttggagtggctaagcagttggcatgggccatgcattttctagaagaaaaatcccttattcatgggaatgtgtgtgctaaaaatatcctgcttatcagagaagaagacaggagaacggggaacccacctttcatcaaacttagtgatcctggcattagcattacagttctaccgaaggacattcttcaggagagaataccatgggtacctcctgaatgcattgagaatcctaaaaatctcaatctggcaacagacaagtggagcttcgggaccactctgtgggagatctgcagtggaggagataagcccctgagtgctctggattctcaaagaaagctgcagttctatgaagataagcatcagcttcctgcacccaagtggacagagttagcaaaccttataaataattgcatggactatgagccagatttcaggcctgctttcagagctgtcatccgtgatcttaacagcctgtttactccagattatgaactactaacagaaaatgacatgctaccaaacatgagaataggtgccctagggttttctggtgcttttgaagacagggaccctacacagtttgaagagagacacttgaagtttctacagcagcttggcaaaggtaacttcgggagtgtggagatgtgccgctatgacccgctgcaggacaacactggcgaggtggtcgctgtgaagaaactccagcacagcactgaagagcacctccgagactttgagagggagatcgagatcctgaaatccttgcagcatgacaacatcgtcaagtacaagggagtgtgctacagtgcgggtcggcgcaacctaagattaattatggaatatttaccatatggaagtttacgagactatctccaaaaacataaagaacggatagatcacaaaaaacttcttcaatacacatctcagatatgcaagggcatggaatatcttggtacaaaaaggtatatccacagggacctggcaacaaggaacatattggtggaaaatgagaacagggttaaaataggagacttcggattaaccaaagtcttgccgcaggacaaagaatactacaaagtaaaggagccaggggaaagccccatattctggtacgcacctcaatccttgacggagagcaagttttctgtggcctcagatgtgtggagctttggagtggttctatacgaacttttcacatacatcgagaagagtaaaagtccacccgtggaatttatgcgaatgattggcaatgataaacaagggcaaatgattgtgttccatttgatagagctactgaagagcaacggaagattgccaaggccagaaggatgcccagatgagatttatgtgatcatgacagagtgctggaacaacaatgtgagccagcgtccctccttcagggacctttcgttcgggtggatcaaatgcgggacagtatagctgcgtgaaagagatggccttcactcagagaccaagcagacttccagaaccagaacaaagctctgtagccttgtgtctacacatccttatcatgatgctagctaggcagaagaaactgtgacgccgtctgctcaaagctttgcttc

SEQ ID NO: 177 - DNA, 3390 bp, Mus musculus
atgggaatggcctgccttacaatgacagaaatggaggcaacctccacatctcctgtacatcagaatggtgatattcctggaagtgctaattctgtgaagcagatagagccagtccttcaagtgtatctgtaccattctcttgggcaagctgaaggagagtatctgaagtttccaagtggagagtatgttgcagaagaaatttgtgtggctgcttctaaagcttgtggtattacgcctgtgtatcataatatgtttgcgttaatgagtgaaaccgaaaggatctggtacccacccaatcatgtcttccacatagacgagtcaaccaggcatgacatactctacaggataaggttctacttccctcattggtactgtagtggcagcagcagaacctacagatacggagtgtcccgtggggctgaagctcctctgcttgatgactttgtcatgtcttacctttttgttcagtggcggcatgattttgtccacggatggataaaagtacctgtgactcatgaaactcaggaagagtgtcttgggatggcggtgttagacatgatgagaatagctaaggagaaagaccagactccactggctgtctataactctgtcagctacaagacattcttaccaaagtgcgttcgagcgaagatccaagactatcacattttaacccggaagcgaatcaggtacagatttcgcagattcattcagcaattcagtcaatgtaaagccactgccaggaacctaaaacttaagtatcttataaacctggaaaccctgcagtctgccttctacacagaacagtttgaagtaaaagaatctgcaagaggtccttcaggtgaggagatttttgcaaccattataataactggaaacggtggaattcagtggtcaagagggaaacataaggaaagtgagacactgacagaacaggacgtacagttatattgtgatttccctgatattattgatgtcagtattaagcaagcaaaccaggaatgctcaaatgaaagtagaattgtaactgtccataaacaagatggtaaagttttggagatagaacttagctcattaaaagaagccttgtcattcgtgtcattaattgacgggtattacagactaactgcggatgcgcaccattacctctgcaaagaggtggctcccccagctgtgctcgagaacatacacagcaactgccacggcccaatatcaatggattttgccattagcaaactaaagaaggcgggtaaccagactggactatatgtgctacgatgcagccctaaggacttcaacaaatactttctgacctttgctgttgagcgagaaaatgtcattgaatataaacactgtttgattacgaagaatgagaatggagaatacaacctcagcgggactaataggaacttcagtaaccttaaggaccttttgaattgctaccagatggaaactgtgcgctcagacagtatcatcttccagtttaccaaatgctgccccccaaagccaaaagataaatcaaaccttctcgtcttcagaacaaatggtatttctgatgttcagatctcaccaacattacagaggcataataatgtgaatcaaatggtgtttcacaaaatcaggaatgaagatttaatatttaatgaaagtcttggccaaggtacttttacaaaaatttttaaaggtgtaagaagagaagttggagattatggtcaactgcacaaaacggaagttcttttgaaagtcctagataaagcacataggaactattcagagtctttcttcgaagcagcaagcatgatgagtcagctttctcacaagcatttggttttgaattatggtgtctgtgtctgtggagaggagaacattctggttcaagaatttgtaaaatttggatcactggatacatacctgaagaagaacaaaaattccataaatatattatggaaacttggagtggctaagcagttggcatgggccatgcattttctagaagaaaaatcccttattcatgggaatgtgtgtgctaaaaatatcctgcttatcagagaagaagacaggagaacggggaacccacctttcatcaaacttagtgatcctggcattagcattacagttctaccgaaggacattcttcaggagagaataccatgggtacctcctgaatgcattgagaatcctaaaaatctcaatctggcaacagacaagtggagcttcgggaccactctgtgggagatctgcagtggaggagataagcccctgagtgctctggattctcaaagaaagctgcagttctatgaagataagcatcagcttcctgcacccaagtggacagagttagcaaaccttataaataattgcatggactatgagccagatttcaggcctgctttcagagctgtcatccgtgatcttaacagcctgtttactccagattatgaactactaacagaaaatgacatgctaccaaacatgagaataggtgccctagggttttctggtgcttttgaagacagggaccctacacagtttgaagagagacacttgaagtttctacagcagcttggcaaaggtaacttcgggagtgtggagatgtgccgctatgacccgctgcaggacaacactggcgaggtggtcgctgtgaagaaactccagcacagcactgaagagcacctccgagactttgagagggagatcgagatcctgaaatccttgcagcatgacaacatcgtcaagtacaagggagtgtgctacagtgcgggtcggcgcaacctaagattaattatggaatatttaccatatggaagtttacgagactatctccaaaaacataaagaacggatagatcacaaaaaacttcttcaatacacatctcagatatgcaagggcatggaatatcttggtacaaaaaggtatatccacagggacctggcaacaaggaacatattggtggaaaatgagaacagggttaaaataggagacttcggattaaccaaagtcttgccgcaggacaaagaatactacaaagtaaaggagccaggggaaagccccatattctggtacgcacctcaatccttgacggagagcaagttttctgtggcctcagatgtgtggagctttggagtggttctatacgaacttttcacatacatcgagaagagtaaaagtccacccgtggaatttatgcgaatgattggcaatgataaacaagggcaaatgattgtgttccatttgatagagctactgaagagcaacggaagattgccaaggccagaaggatgcccagatgagatttatgtgatcatgacagagtgctggaacaacaatgtgagccagcgtccctccttcagggacctttcgttcgggtggatcaaatgcgggacagtatag

SEQ ID NO: 178 - DNA, 96589 bp, Homo sapiens
  misc_feature (29878)..(29897): "n" at positions 29878 through 29897 can be any base.
actaattttttgtattttagtagagacagggtttcaccatgttggccaggctggtctctaactcctggcctcaagtgatccgcccaccttggcctcccaaagtgctaggattacaggtgtgagccaccatgcctggcactattcatttttcaaactcaaatgacatctactttaagagaacatactttgtggggagacagatctagattcaaatagcaactttaatactagaagttatgtcagtttgggtttgaaatgaaattcaggcaatttctgtactttattttctgtaaaatagagataataatacttacctaatagggtataaaaccaaataataaaaatttcagtcatttcaatatttattgtaccaggcactgtcctacgtattaggtatatatggtaatgaataaaatagacctggaactcacctctccttgaaagaaacagacaaataaataaatgaaatatattgtatgtgaagtggtaataagtgcaatggaaataaactaattaagtgtttggtgtaggttgaggatggagaggcattgaaatttcaattgtaattgcatctcacctaaggaggtgatgaagtgagccacggggatgtgagaacgtgggagaggggccagggagagtcactgttctgattcctggctgcagctgtgattactgccatatctcttgtaattatgcatgtcggcttccctgaaacaccaactctggccttctacaacttcagaccaaggtctcccagtcgagtgccttcctgtttgcattctataactgagccacaaacagccctgtcttgagctcttattttcttataaagtttctggatatatctgtattttatttggtatgctcttaattatagccctctctccccattcctcttctcgctgctggaaggtggtggatggctaggctggaaggctatcctgagcaataccgtcttatgttggtatttattatttggttttataccctattaggtaagtattattatctctattttacagaaaataaagtacagaaatagcctgaatttcatttcaaacccaaactgacataacctctggtattaaataccaattatcagtcatcacacctcctaatacccagtcattttatccaggctaagcttctgcacctcaagttcttcccttaaggtgaattttttctatagcgagacctctgcccagggagttaagtgctaacctgtttcctgatagcttaggggtattattaatacggaggatttggccactgatcctcattttgtcctgctattgttcttattcattaattcatttatacaatggcacttatttaacatatactatgtgtcaaacttgcattgatactggatatacaatagggaataaaacaaatatagttctgccctcatggtctacaagggtttctttggattcttatagaatacactcttcctctgcctaccctaccaggtaacaaataggtatatttcttgggctgcctcatctctgcacactccataacttgttgtacatgtatttatatctgatgattgtatctaatcaattatctctatgatttgtaaggtctttcagcagcaacatttgtgattttagaatttgattgatttgtaataagtgtactcagtgctatttgacttaaatttgttgcactgcaacttagtgtagccctgataaaactggggctcccatgtggtctggcatatacagtaaatgccttaaaaacacaagcgttataatcaagaatacttgaagaaaaaatttaaggttttatataaagggaatgaaagtaggtccactttataagttaaagcaaaatgttttaaaattctctattgccatccacttcttattcccatctacatactgaagcaacttgaaagaaagatctcttctttttgttcattcttcaagtcaaggtactgcatctgtgcctcacttatattttattccctaacccctccccaccatatcacctgttatgaaaggcaacctaagttctttggcttatttattttcttttactttacccattacaaggattctctacaacagtggttcttgaactttagtgtgcctcagaattgtctggaaggcctgttaaaacacaaatggctggaccctacttccagagtttctgatacagaaagtctgggttggggctcaaaaatgtacatttctaacgtgttcccaggtaatgctgatgctgcctgtccatggaccacattttgagagccactcctctacagtatagcatctgggagccattccagcaaataagaaatctatccatggatagaagcctttgctatatattatacataaatattgttacctgattgcctatatattaatatgaagcttatgaatttaatgaatcatcttccatcaccacgtttaaaattctgtgggttggggtgtatacttgggataggctcagctataagcaagaagagtaaaggaaataatatttattacttgcttgtctattcaggagatagtagagtgtgattgttagaggagttagctgtgcagccaggccctttggggttcagtcttagcccagcaggatttctgagagacacttgaaagacatttaaccttttgttcctcactttcttttgagatgaggataatgcaagtaaccacctcatagccttgtggtgaggctcaaatgatttgatacatataaaactcttgaagatgcctgatatgttgtatgaactgtgatgttacctattattgttatcaggaatttgttgagtgttttctacatgttatctcattataacctcaaatcaatcctaaatgcaagtgcccctattattctcattgtagagactagaaaacagaagtttagaaaaattgagtaacagattaaaatctcccagctagtaacaatctctggtctttgtatttttccagcattttcccaaaggaatcatttcctcctgtaagaaaaatggttcaggaaatctgtacgattcaaaagcatatttgaagataattggataattacttgatcagtatggttgatgaattttatagtcaatattattgtgtctactttaaaatgtaatcaaggcaaaaatggaggcaacgatgggtaaaagagtggttgtgtaacacactagtgagtttctaacatttacagagtaccgttacataacaggcgtttaataaatactggtcaaacgactgggatgagtgtgttttggaactaaaattacctaaaattaaagattcataatattgagttagtgagattatagagaaatgagcattgatatactactgtggaacttctggaagttgatttgacagtagtcaacaaattttaaatttgtatttcctttggtacagagagtctaagtgtctatcccaggaaatacatttttgcccatgaaatgcatgttcaatgccttcaaatttaacactgtgtaactggagaaattagaaacctaaatgttcataaataaattatttaataaattattagcacctgttttactgacacagtataagagttaaaatgaatgagaaaagcaatacatattgacatgaagtatctccaaggtattctaagtgaaaaaaatgttaacagaaaaacatgtgtagaataacccattttatttatttaccaagctcaaaactatatctataggagatatgtaagaaaatgcattggaaaaagtttgaaagagtaaatctcagatagttattaatggtggcctctggaaattgaagagggctgggagaagagggtcaagagaaatttccactttgtacattttttcttctatgttgtttggattttccacaattgctatgtatttatgtttacttgtgaaattaaaaatgaaaaaaagtagtttgctcaacaaatatacttaaaagccctttaataaatataatagacattaatatgtacaacagtaagttttcatgagccttaaaacatatctattctggtaatacgcatttgttttcaaaaacctccaaagtcatcactgttactaaaattttattacttgtaatgctattgagtcccagaatatttcctgtgagtagtaaaagagctgaattagcatctgagtggaaagcacatgatactaaaattcttgtaggattagactgctcagccaaaagagcttgccttagcactgtgacatcattttatgcttgatctataacaggtggagatgacagtaaacataacaaagcaccattacacaaaaggagaaagcaaagaactgtttttcccctccaaatggacagctatatcatgttcagtgggggacactgttagatgtggatgggaaacctaagtatgtggataaagtaagaccaccctaataagggcgctcccttaataccagctgccttttctagaaggaaaacacctgctttccctctgatcaactctcatgacatagagataaagaggtacagcctcaaacctcagaaggataaggcattcagggaaaaaaagggggaaggagaagagaaaagtctagttaaggacaaattatggacatttggaggtatatggccaagcaggagtagaagttaaaatggagaactgtttcatgcagcattttctggtccagttgtgtattttgtagttgaaatggaaatacacagtattccaccacatcagtatgatactttaatatcaaatcagattttcctttggtcaatagcatagctagagtggaatgaccacagcaattcctatagctacagcccagaaaattcacaaaattattaagttacagagaaattagagtgaagcaagtgagaaaagaaaacagaacaggggtgaagggtgtggtggttgggagaaggaggcgtgggtgagaaaaatttcactgtagtaaacgtccatcataatcaaagagggcttatcttctgctaacctatgggttatatgtaatatctcagattatgactaatacttgcatagttctgcttggctttatgattgaagatagacttccacactttgtgggtgaatcatacattttttttaaatatacattttccctgttgtaatttgacagagtatttttctctctcatcagcttactatgatgtctcccttactcctggttatttcagttgtgagtacgctgacactactagatctaacttaagtcaaaaggagaaatttgtcataaggaagtattttcaagatagaaaatgcatgaagttttggtggaccttataagaaagagggaactgaaaagctatggggacacatactgcgcacattctctctctcttctcttctgtggcattcttctctcctatagcaaatcagctttctgtgcaagaatgaagatggtaacctcatagtggcagccttaactttagagcatgggtaacctcatttcaagtgaacagaaaagtctgatttgctgtttttgaatcccaactccaaattccccaggagtgagactctgatggctcagcttggtccaatcaaggggttgtgggaagcagggtgtcacaaactagaacgtaggtgccagaggctggctactctgggtgaagaggacagttctcagcaaagaggacagaatccttagtctaaattaggactcaggaattaagtctctgagtctctgtaaactaacaattatgctagggatttatttttattttttattttattttattttattttttgagatgggagtcttgctctgttgcccaggctggagtgcagtagcatgatctcggctcactgcaacctccacctcccaggttcaagtgaatctcctgccgcagcctcctgagtagctgggactataggcacatgccaccatgcctggctaattttttgtatttttagtagagacagggtttcaccatgttagccaggagatcttgatctcctgaccttgtgatccacccacgctggactcccaaagtgctgggattacaggtgtgagccactgcgcctggccgaaattttgtttttaagagtgaatgctggcatgaatcctttcacacacacaaaaaatgtttttcgtgaataggcaactatatgtctaacagttttaagttaaattttttaaaagtagcacatagttataatggtcattttacatattttgccaaataattatcctcacttgaaagaggttattaattcttggcttacaaagggaaaactgttttggttttcaagcaccaaagtttaatacatccagttatctcaagggaatgagggatctgttcactggcaatatcttttttgttttccttttctttttgtgattgaaagtaaggataagggaactgatgtagagacaaggacatgctgaagtaccgaggaggtattggaaaatttctttgccatagccaaccaaattttggaataaatggtactaaaatatctggatgatttgtagtaaaaaaaacattgcttgcttgtctgtctacttgattaataccccttgcctttgtcttttggcttataatcctacatttggaataaataagcctctttccatattttattcctttctgccttcaggaaagtacatcttccctgttttggaaagaaacaaactaactcctggacttctccccagcccttcgtttgagcctgtttccctttccaaggactttcctgcatctttttttgtgctcacatttatgtccctccttaagaatgatgttttcagtctcatcatttaatgatatagttctgttttttaaaattcaaatggagatcttcacatttatctctattacaactcagcccttatcctaccagcccacacagtcctgtgtagtgcaataaactgtgacaaatacttcaatcttcctaataaaattcaacaaatttcttatacctcccagcttggttatatctgtaaattggtcctgccacagatataatagacatttgataactgtgctaagggttttaaaatactttttcacctaatcttcaaaatctctctacaggggagattattatcctcattatactgatgaggaaacagaggcttagaaaatctaaataaactttcctggcaaaagctgtgattgaaagaaacctgggtggtctggactcttaaagcgtaagttcttaaacccttggccatggattttcaaccgtggctttatgtcaaaccacctaaaaatgttaaaaagttatagaagccaatgcgccatctcacacttactgaggcagtcttgttggggtggggggaaggtttgggcatagcagtcaagaatcactgctgccatgctggccaacactggaaggacaaaacctcaagacactacacacagccccacagtcaacaactagctgttaagttttcccattagatcttgccacaaagttttgaatctaaatgtgttaccttacagctcatatttcttgtttcttcatattgtatgaatgttttgaaagacttggtcaaattccttggaattcttttcatcattatcaaagaataagggaaatttcctgaaatgtttgccttgagtagcaaatttctagtgatgccactaccaggaatcacataaagagctcaaaagttctgttaatacagagtgaaaaaagctcaacattccaggttagcattgacttaaaatcatgtcttagtgatgagggaggctttcactttctgaatgacaggaggcaagttgcttcatctttctatgtggggagacagaagatttctcaattctataggcttatgaataatataccccttgtccaccttgtcttccatacccacatctctaatattaagaaaataacctgctcccccacaaaaatatcctcaatattcaccacttccaaatggcttctccctgcaattcaccaatttcaaatggcttctccctgcaaacaggctgtggacagtaagagataccatgcctagttacataagtatatcactgcaaaatatagaaacatcacttataatgaaagtaatactgtttcagagttctaaaacaagcattttcttcccctcacaaaatatcacatttccatttccacagttgtgatgcttttcatttacccatgacgttaagctcatctttagctcttcttcattatgtgggtctgtgttctagcttttacctcagtagcagtttttgtttgcaggaaaaaaggaactcttttggtagtcactgtttgtaattgcggccttgatattctaagccattgagtcacaattaataattagaaattcttactaactttgcccatatattacctatgaagcagtagccgtaggaatgcaattttcctgtaaatccctccctcttatacagctctagttcattatttaaaagattcagggtgaattcaagtaatttcctatgctgctatcatttgcttaaagaccttttgcaatgggtcttatgtaagaagaaatgcaggagttgctttggtgaggtttatttaaagaaaccattaagtgcaagacagacctgaagagcagcatcagttgtgtatggggaaacaggagctatgaatgcgtcacttcatttaggttgacagaaagagggctaatacttgaaaaaaatccctacacgatctggtgccaggctacttctttggcctcacctcttaccactgccccctccttccgtgtcctccagccacagtgacctctttcctgatccttgaacttgccaaacactttcccttctcaaggtctttgccttcaggagtccctctgcctgaaattcttttcccagatagtcatgggactggttcattctcatccttcagatctctgctcaaatgtcacttattctaggaaatcgttcctggccaccgtaaaatagcacaccccctcctcactttctactccttttctttgttattatgtatatggcagcagaaaactatgcattttcttagtggcaattacacaccccgcacattatgcatttaaagcgttgtttgttgttttgtcgcttccatcagaatacaatccagtagggcaaggagtgtgtggggtcgtgttcacctggtatctctggggacctacagcccggcacctagtagacactcagtaaatatttgaatgaatgaatgaggccctttggcagccgggaagcccgtcacagccgttgtctccaccctctcccgggctacaccaggccacgccggtaaagttgtttctcctctaggagaaacattcgctaggccttgttgccaacccgcaggcggctgggcgcttcatcccaccctcacccctttccagccaaggtggctgatgggagtcaggctctcgagggcgcattgccacgaaacagcgtgtgtgagcgcgttgtccccggcccccggcgccacttcccctcggcctagcagcctggactggggaaggacgggtctgctgtacccgggaggtggaaggaaaagccgaaagcggagaagtgtgcgggaggggagtctccgcgcggaggcagcccggcctcctccagtgcaggctgcgcgctggggagccagccagggtgagtcactcccggccgcttccctggagggcggcggccacacacacacccgcccatctagtgagggccgggcccagcgctggcgcctagctccagccgggcaccagcgtttcgcgaggcgccgccgccttaacttccttgcgcgctcacgcccaggggccgtcccaggaatctccacgcgcgctcgccggcttcccgagaggcagctgccctgcgtggcccgcgcctgccggtcccgcgaccagcaccgagcggcgcacgcgcactgcaggacgcgcgtccggctctcccccagcctctatccggcccggtctcctgccattcggggagactgcaggccaaccgggaggctgagttcgaagctagcagggcggcgaagccagtgtcgcccgcggcgttgagaagacggtgtggccccggagagggtggagacaactgtgacgggcttcccggctgcccgaagtgggagtggtgtggggctgcaggaaggagagaggaagaggagcagaagggggcagcagcggacgccgctaacggcctccctcggcgctgacaggctgggccggcgcccggctcgcttgggtgttcgcgtcgccacttcggcttctcggccggtcgggcccctcggcccgggcttgcggcgcgcgtcggggctgagggctgctgcggcgcagggagaggcctggtcctcgctgccgagggatgtgagtgggagctgagcccacactggagggcccccgagggcccagcctggaggtcgttcagagccgtgcccgtcccggggcttcgcagaccttgacccgccgggtaggagccgcccctgcgggctcgagggcgcgctctggtcgcccgatctgtgtagccggtgggtgttatctctgcctggcttctgggtggggggcagcagctgtctctccacccccttcctaccttttggtcccgcctgccccctgctagtggcagcaaacttctgagccagaaaaatcttcctctttaagacgacacctagaacgagtcttgctggtgatatttgcttccatttgtgtcttataattccctcgctcccgcctccttattcctttttaaaattttctagacacttaaacagcctagaaaaagcatttgtttcccctggatttatgtggtagtagttaactgctgcttctgtttttaggtttcagaagcaggcaacaggaacaagatgtgaactgtttctcttctgcagaaaaagaggctcttcctcctcctcccgcgacggtgggtgtgctgtcctttatcgctgcagtaaaggcgaaggtgtctggagctgggagtgcgtgcgtagggaaggttggaagcgtgtgaagagaggcagggctcattgttgcttactcttctgaaaatgtcagtgctaaacttttaatgttgatctgggagagtaattttggggtgttttgttgttcgtcttggatcctttaagaaacatttttttgttggctttacacataacgtgactttgcagagaaacgaaaaacgttgtccattaccctttcttcttaagcagccagagattcttaatcctttaaagaggagtatttccaagcaataagagatagcttttgggagaacacgttagctattcttgctggggtttctgctaccacattgaatgtttcctcatggttttatctgcctaagcttgctgtgtcggttgaatttacccagtttgttttccagtaattactaatctgttaggagaaactccatttctctgaatgaaagggtaggagcggctgagtatggagaaggaaactggaagtgggaataagggaaatgattgcttttggtttcataataagtttgtacagtgagttgttgggctactgcaaataaagattttgtatcccttctccagaatgcttgggaccaaaagtgttttggattttttttaaaaattttggaatgtttgcatatacaaaatcagacatcttgaggatgggacccaagtgtaaatacgaaattcgtttgtttcatatagaccttattcacacagccactaagtcatttgcaatatttttaatacgtctgtgcatgaaacaaagtttgtattaagtacctatgcggggaattttccccttgtagcatcatgttggtgctcaaaatgtttcagattttgcagcttttcagataagggatgatcagcttgtattttgatataacacccagaacatttgaagatgaataatcaatttttggcctcccttcccccatccgcctcaccttataccactttaagtgtgagaattatttgcttgtacatgcatttgtctgttggtgtgtaacgtatgtacagactggatgtatccagcacttgccttaatagtacatgtatttacctgaataggaaagctgcagtacttgctggccagaagagcacaccatgcttgtttttgctctaactgaatatcctgtatttgcaatttatagcagttttagggactcattagggaattttgtgtgtgtgtgcctttggtgatttgagacaggtgtctcagatatgggaagggaatatgacattgtttctctttcacctggctattactgaaaggtgggatgcttttgaggcagaataggaaagtgcattggctttggagtgagatctggatttgaatcctggtgttcttgccacttaagagttgcattatttacggctggtcatggtggctcacgcctgtaatcccagcactttgggaggctgaggaaggaggatcacttgaggtgaggagcttgagaccagcctggccaacatggtgaaaccccatctctactaaaaatacaaaaattagccgggcgtggtggtgcacacctgtaatcccagctactcgggagggtgaggcaggagaattgcttgaacctgggaagtggtggttgcagtgagccgagatctccactccaggctgggcactgcactccaggctgggcaacacagcaagactctgtctaaaaaaaaaaaaaaaagaaagaaaaaaagagttatattatttacgactcttttagcttcactttcttataagattgttgtgagaagtgagtaagacacatgcaaagtggtaaactgcctggctgtcataaaagtcttggctactatcacggctgggaggcaaaggagattcagagaagggcagaatgactgcataaggtgatctgcctgtaactcgtgtttcttcctttctagtataaagagataaaggacttcaaggtcttaaactggtgagggagtattacagcctttgtatggaaaggtttgactttgtgtctctgcttaaacccccattgtgttgcccctaccaattattgtgctgcccccttgtggttaactgtgctaagacctttcttttgctcttctcccattacatttcccacccttccccactcccttttagacccctcctcttagctcccagtttcccaaactgtgtgccaaggtgcccagagcacctcaggcttgaacttgtgttttgagttggttcatggtttcaatattagatacctacacccgtttctacaatgtcatgtctttgtaaagatgtattttcagaggttgctccgataaaaagcaactactacatgaaaatgaatgtagaacaggaaatgacagtgtggtattgtccaatttgattctaaggtttgataagttctacagtgctctacactaagttgtaaggacataactactaagtaagttgttcaaacctatttcttttggcctgggggtgtcgtgaaaaatttgctaagactcagagctccctgaatgggtttggaaacctctgccttagcttttagtttgcttttctgataaaattattgatataaagctagtaccagctgatcatggcttaatatatttcctctcctatgtaatatgtttataacttctgcccagttctttcattttaaaactaatcctattgctaacttgttgtactagtcacttcctggtttttcctgtactggtcttctgcttctacttctgttcatctccttaaactccgaatgccccaagtgaaagttaccattttctaccccttaattttcttctaatcatgtaggctttaaattaggcatcatctttaaactacttctttcatttacctcttattcccattcaaaatgtccatatttcctttctttctcatatctctgctttccctcctttactgtgtgaatcccaggacacatttcctgagcctagaatattgaaagtcatttgaacttctgagaattcagtgtcccttccttctgtttatcctcaatagagattccactctaatactccttattatagcattcccttgccccaaaaccttcagtggcttaccattttctacttattaaattttcctgacttttaagatagtctattatcaatccctgccctatttatttagtcttttgtctaaggatctctagtccttaagcttgtaagctgatttccacactttctaataataagctatgcttcttctatcctttaatttttgcccatgttctccatccctcttttttttcctctatttctgtagctctttagtcttagaacattttcacatggtttaattatatgccatgctttagttgtttgatagttatttccctagtgttagccatatcttttcaagttgattgtgtattctttgaggagcagtaccttagattaaaaaaaaaccacaacacacagtggagagcacatgggcagcattcaagaaatacatgttgattgtgtgataaggaactgtagtcaccaaacaaatatttgttaatacttgcaatgtaaaaggtacttggctgtattcaaaagagaaataaagaaatataaaataggctcctttccctaaggacttacagtataattgggcagataagctaaataataaaagttacagatatttaagaccacttgagttgagcagagattttgcataataggaaggaactggtagagggggtaagcaaaggcaaaatatgtatatatgtatgatatgttcagagagcagtacataaataacttgactgaaatgaagatttgtgtgaaagagtagtaagaaattgtgttaaaaatgtagttggaatttgattatggatgtctttaaatgctaggatgagaagaatgtactttgacctgtagatatggagaagctttaaaagttttgaattgagaaagagtttgctgaaataagtattttaggaaaatcaaagcagcaccagtgctaggtctcatatgaattggaaagagaatggtagaaagaggtaggaaaataattgagccctgaagtaatgaggacttagaaataagtcagattgcagagatgtcacaagacattattatggattggataagaagggagaatggaggggagaagagtgattaaagattaccttaccttgaaggtttgcttttcagtgacggaggaaatcaaagagtgttgactctccaagacatcttagaacatctaagtctatatgttttgtatattaggactcagaccagagagatttaaaaatgtgtccaaagttactcagctagttaatgacaaagaaactgccgtttgattaatggcagttactaacaaaaatagttatggcagtgttagtagctggtagaggggatgtagacagttgagcgtatattgtggatatgttgagtttgcggtggccgtgggatgggcaagtgaaaattgatagcatacagtgggacatatgactagaatttgttagcgaagttaaggctggtgctgtggtacttaagagaaaagagtgggattgcccataattagcgggtgggtgaaaggagaggaatgggtaaaggagacaaagaaaaaaacagtatgagaggcaaattagtggataggttaggaggcggaatgatcaacatgttgatcattggcaagaaatgagaagaatcagatccaaaaaaaggtcttaaaaagatgtattcgtgtttttcctaataagaaatctataaaaacagaagaaaattgcttatactttccctacgtggaaataaccactgttaatattttgttctctccggtttaacaaaagacctttggatttgacagttgggtgatcagtggagacttttccaaagctctccatcactaggactaaggatgagaattttaggcataataaaacctaggagatatttttcaacagattgtcattcgtctgtatcgtcttatatatcacactgtccaggtactattcttcctgtgtgcattggttctgtgtttttttctgaatgatagaaggttagacaagccatctctgggtgcttttgtgctggtaaaatttgaataaagtgataaaatatttgtttctaaaaggaaggagaaattcttggtcgataacttataaatctgagggttgaatgattgatgaaattaggggtactggaaagaacaaagagaagcattatttattttgaagcttttctgtatagttacaaagggttaactaggttagaatggtccatgggctgtttactttgcttgcatgtttattttgatcttcccaagaacattcttctgttcatctttttagtatgttattggaaacagagtactcattagttcttactaagtggttttagtttaataaattatgattatgaaataaaatgctattaggtaatatttttataatataaagggccatgtgatgtgagtaagtgcactgttttggaaatcaggggataagggactgaccctgctctcagcatggtatatgatttcaggcaactcacgtaatcagtgagtcttgtctattgagggaatggactaaatcttttctagaaaatttaaaaaggtgggatcacatggtaaaatgtgtataaagtttaaaaaggaaatggtttaccaatgtttatgacaaaaaccagcaaactctttcccacccccccaccccacatctccttttctagtctctaattcctgtacaccaggcaaccacctgtcctctgtactttgccgttttcacctttataatgaatgaattgtttagcatcccctctaaagcctctccattcagttgtgtagaagagctcatcccctttgccttcaagggctttaccattatatttctctcctctttttcttgccttctcaattcttccctctactggattatttccatcagcattactctgattgctattgctgtgtaacagaaactacccaaaacttagtgatttaaaacaactactttattaggctcacagataccatgggtcagtaattgagacagggcacaccagggatgactttgtttttgctccacaatggctactaggacatgagttgggaagaattgccagccaggggtgacttgaaggcaaaggactggaatcatctggaggtgtcttcactcacatgatgggtagttgatgctggctcttgactgggatgttagctgggctgttaactggagcatgtacatgtggcctggatttcctcacaatatggtggcttcagggtggtcacctttcatagtggtgagtagagaattaaaagtgagtgtgtctcagcataaatcttttatgatttagccttggtagctgcacagtataacttctgccatgtcctactggttgtaagggtcagaagcctgtccagatttgatgggggagtggcaagttcacactgcagaagaaaaacatgtgagatgggaaatagtgttatggccatctttggacaattattaatactattgccatagtttgccattttgccaaacttcacatccctcctgtatctgaaatacacgcaaaatacactgagcttctcctcaaaggtccctaattcacatcccatcatgacagtaactcagagtccagtatctcatcatataaatcaggtccaggtacagaatagttttcttgggtatggttaattggatatggttcttcttgaactgaggacccatgaagagacagtttatatgtcccctgcatactttacaaaatggaaaaggcacaggttatctgcagtagacattcctcctcaagaagcatgcaaggtaggcacagtctgtagcaattctgcaacctcactgggcacatgttgccagttccttgattaggtctcagtcctgcttcctggaagtcattcttaataggacataggcttcttctgtttttgggtttaccttctgaattatttatctcccccacccctgcacccaacccatataaattgctttgtatttgtaagagtagctttctgagcttgcttcctgcctgtagtgctccagagtccaaaggcccccttttatatagcaactgtccctttcattccaagctaatacaactcctttaaaaactttgtggacttcctgtgtgtaagtttataatctgtactgccatacccacaaatctcttttgagaggaactctttcctcccctaagctctgtgtgagtctgctgtgggacaacacccttaagatccttagataatatttcgtctgaaaggatctatgaggtactgatttagatcttaagaaaggatcttataatcacactctagattggatctttgctctgaggccctttttatttgacactttgctggctgaaaagattgttctgagtccattacatctccttgaaattctactcaaaaaatgaatagcttattctttagttcatctctctgttctctcaattataagggcagctagaagaagccaaattgctttaacttcctgctgagaatctccttaattcattaggtcaggtatgtattttattttccatgttaatgtaggtgacagttttgctaaactttgccctagtatgtaacaagggtgtcctcttattcagctttcactatcatttctctcactttgcttgaagtcctcactgacagtctccttgagggctcttaggctcccatgaagtttcctcaagaccctttacatgtgtgaacacaaagggtccttatctgttcctggctatatagcaggtccttgaataactgtcatttcttcataacgttgataagaaaaaaatggattcctggctggggccactgtttgtgtggagtttggacattctccccacgtctgtgtgggtttttccgggtgctccaatttcctcccacattccaaagatgcatatgttagtggatcggtgtgtctaaatggtctcagactgagtgatcatgtatggatgagtgtgccttgcagtgggtgatgtcctgtctagggttggttcccaccttgtgccttgagttgctaggataggctctagccactcgtgactgaactgaattgggttaataattatcctacttgtttttattagtctttcttaaatgtgtgtatagctcacatttatttcagtgtttaataatcagagtgtttggaatctttacttagaagtttgatgatgtttttgtggccataaatatgccataggaacttccttatctcaattagcctatggaaaaatggattttgttacacattgtttcacttaaagtcacagtttccaagaacctattgaagacagtgaggattaactgtactagaactgtttcctaacccactggttcttatcagaattacctaaaggacttattgaaacacaaattgccgctgggccccacccccagagtttgtttcattagctctggagtgggacttgaggatttgcatctgtgagttcccaggtgatctgataatgttgatctggggcctagattgtgagaattactgatttaaaccagggattggcaagatttttctattaaggatcataaataaaatattttagactttgtgggcaagattgtttctcttgcacctactcaattccgcctttgtggtgcaaaagcagttatagacaatacgtaaatgaacagacgtggctcatggctgtgttctcataaagctttatttacataacaggcagctggctaaatttggtatgtgtgaactgtgctctgccaattcccaatttaaatcattacttgactccacatctcttcaagctatggccccatttttcactcccctttggaacaaaactctctgagagttgtctgtatttgtctctttttattctttcataaaaaaattatctattttttgaacacatttaaatgtcttagaattcaaaaagtagtaaatatctttgtacatttgtcagggcgtgtgtgtgtgtgtgactataactaaagattaagtagaagaggagttgctgattcaaaagtggtatatgttactaagttcaacaaatattgccaaattgacatagaaataccaagttatgcttttctacacctttactaacattgtgttttcagatgacttgattgttgccaacttgagacgtgaaaaatagaatctcattataattttaatttgctttttattctccttttttagggaactcttcactcatatcttggcccactttctattggatttgtggtccttttactttgctttgtgggagctcttatactaaggaagatagctttgagtttgcgaaatgagttgttttccctaggttgtctctttatctttttgattctgtagatagtgtgattttgttgttgtgcatctaggtaggttccttctaaccctgaaattatattttgagattctcccttgttttcttgttccatctggaatttatactgatgcaagatataagatgggacgcaacttttttcccctagatggttgtccagtttcaatactatttgtcagataatccttcttttctctgctgctgtgaaatgctggtgttttaaattgtgtatgtagttggatctatttctggactttgtttcattctaaaaatggctcctctgaaaccatattgtgagttcttgggtagtgaacatttctatttatttgtttccaagtcctgtataatatttattagcatatgggaggcattcaagtacttgaaaataaaatgaataaatcaagcatttaggaatagaagcagatctttttgccaattattcattttagttattctatttaattctctatttctgattttaaacttgaatttaaccttggttttccattttagttttaccttttttttaaactttattgtgaagtattaagttattttttgtacttactgaatgggcatttgctaacttatgtgtctgctcttattagtctatttttggcctcaaattgttaaaaattcacagtatagttttatttgtatcaaatttgctactgagggaagcttgtcatttcataatggcaatccataggataggtcaagtcatttgagattggaaccattaaggataagttcatttaacattgaattattagatctgtggttaattggccaggttagagaagacagaattacagggaagtctggattttacaacttattattttagagggtcaaatttagaataatatttttaagctttttaagtagaagtatatggatcacctgaggtcaggagttcaccaccagcctgactaacatggtgaaaccctgtctctactaaatacaaaaaaatagccaggtgtggtggtgcatgcctgtaatctgagctacttgggaggctgagacaggagaatcgcttgtacctgggaggcagaggttgcagtgagctgagatcgtgccattgcactctagcctgggcaacaagagtgaaactctgtctcaaaaaataaataaataaataaataaaaataaatacataaatagaagtatactattctgattctcttatttatatgtataatttatttttttaaatacatgaggtattgtagattttttggtttttttgaggaggggcgggggtgatgtgaaatatagttttcattgcatcagatcttcagttgtaatgatattgctggaatccaccatttaggaccctgtcttgttaaaaaaaaattatccttgccttcacccctacccctccctgccacagacttttaaaggtaagtattctgcgataattggattatatttactattatgaaaatttaaaattattagaagtaaaatgaaatatacctccattgtagtaagtttgattcacagtgcctctggttatggtggtcagtaaaagtaacactgtattaggaacagtcttcatggtgggagttctctccttttactcttctgttagtttgttctttttttttttttttttttttgagatggtttcactgtcactcaggctggaggacagtggctcgatcacggctcactgcagccttgccttccctggggtccagtgatcctcctacctcagcctcctgagtagctggcactgcaggcgagtgccactaggcctggctaatttttatatttttttttgtagagatggggtttcaccgtgtcactcagtctggtcttgaactcctgggctccagcaatctttctgcatcagcctcccaaagtgctgggattatggttctggagccaccgcgcatggcctgttagtctgttcttgcattgctataaagaaatacctgaggctgagtaatttataaagaaaagagatttaattggctcatggttctgcaggcttacaagcatggggctgacatttgctcagcttctggggagtcctccgggagcttttactcatggtcaaaagctaagagggagcaggaatatcacatttcaagagctggagcaaaagagaatgtggggaaggtgcacacacttttaaacagccaaatcttgcaagaactcagtatcttcaggacagcaccaagggggatgttgctaaaccattcatgagaaatccacccccatgatcaagtcacctcccaccaggcctcacctccaacattggggattacagtgcaacacatgaaatttaaaggggacaacatccaaactgtatcaaccttgctgtacccctcagcctcattttataggcaacaattgaatatattggttttataaaggtttgatatggaaagattcattaggagtggattttaggacttggggaatgactcagagaagaaaatagtgcatgatagtataagtctatctgattgatgagtaactggaaatccttccaaaacataatgcttcagtgtctgcagaattgtttcatttccatgtttatgtatttcttattgtttccttgtttatccataggtgcttaatttttttttaatctgaatgcattatgataatctttaaataattatttcagaggaatatctgaaatattcagtgttcttctagcatggcagtattttaaaaatcattatgagcttaaattcatactgatttaaacaacttctagatttttttgaatatcaatagcagagggtagttttaaatatttcacgagcagaattaattaaatttcctgtgcaattttattttttatagacaaactcgtcacttcttaaaatcttttaaaaatgtcttggtaatacaggcttggaatatgatggtattgaaatgagatcttaagggaaaaaaaactccaacgggtttttttgttgttgttgttgagatggagtcttgctctgtcacccaggctggagtgcagtggcattatctcagctcactgcaacttctgcctcccagattcaagcaattctcctacctcagcctcccgagtaactgggattataggcgcgcaccaccacgcccagctaatttttgtatttttagtagagacggggtttcaccatgttggtcaggctggtctcgaactcctgacctcgtgatccgcccgccttggcctcccaaagtgctgggattacaggcatgagccaccatgcccggccaaaaactccaacttttagaggcctatttacagcacttgtcccatatttgttcacactttttctgtatgtgtgttgtgaattataaatctggcttttcctacaaatgtggcttttcctgtgtagtcatcattaagcatgattctaagaagtagctcaaaatctcctaagaccaaaaaccacaaaaaacaaaaaaaaaaacaacaaaaaaccaaaaccagaaaagggatacattttgcagaataatttatattttcttctcttcatggcatcagttttctcaggagttctttttttgagatggagtctccctctgtcacccaggctgtagtgcagtggtgcgatctgcaagctccgcctcccgggttcacgccattctcctgcctcagcctccggagtagctgggactacaggtgcccgccaccacgcccggctatttttttttttgtattttcagtagagacggggtttcaccgtgttagccaggatggtctcgatctcctgaccttgtgatccacctgcctcggcctcccaaagtgctgggattacaggcgtgagccaccgcacccgggctcaggaggtcttttaagcttttgcctgtcatgtgtgtacttctgacgctggcccaaggtaaaatgattacatttgacttcggtagcccttaaatgtatggctgttcttaatcttttctaaagcctaaaagttgaattagtattcatcttagatttcttgtttcttaagtgaaagaatcatgacattgtattaaaatatcttatttgcatgtattttatatactgttttaataggcagtagtagtatacaagctttgaccaaatgtctcttcatataaaaaattcaagtgaataaaaacagtcatttaaaaatgacattagtcaaaggggcaaaaaagattacaaatgcttattgtgattgacagaacttgcttaacatattagggttctctagaaggacagaactaataggatatatatatgagtttattaaatattaacttaaatgatcacaaggtcccacaataggctgtctgcaagcttgaggagcaaggagagccagttcaagtctcaaaactgaagaacttggagtctgatgttcaagggcaggaagcgtcttggctaatccacccatcttggcctcccaaagtgctaggattacaggcgtgagcccccgtgcctggtgtacatcatttttaatatctttatagtattctgttggctaagttgccacaatttatcagacccctttaatgtcattaattttttcccaatatttagacttgtttcatagaattattagatatgcatgctactactcctgtcctttttcaaaggacaattattagatattcttgttttcctcatatctttgccaacactgggtattggcattcttcttgtttaccagtcagctaaggaagctaaggaagaaacaatatctcatttttatgtacttttctctgattcttaattatgttgaccatgttttcatttcttttgtgaaatgcctatttatgttcattttcatattaaattgtaagagttacttgtataaatatattaaacctttgtagtatatattttttctgtttttttttaaagttttgattatagtgtttataatatgcagtcaaatttacccatcttttatttcctctatcatttttcacttagatgtggggtttagaaaggaggtacataatgtgacagagtttttggtatagaaataactgacatagttagatataaaacataccaaggaaatagtcggaaatgtccaatttcgaatgtgtaaggagaccagtaagaaaatcatgaagaacagctaacagcagtaatttttaaaagggtatttacaaacacttgaaaatgtttatgtagtttaaaggaatgattcaaatataaagagaagcgtaacataaaaatgaaataaaggcatatatatagtcattgtgtagatggttttctagtaacagttataccaagtttgaaatgatttttaggctttgttatgccaacttttaggagttttctttttaaactttttgagcttatgtttcatcatggccaatttttataaattttccctatatgctcaaaacatttttttagtggaaggttttaatacgtctgtaatttctccggtgtcttaaaaataattagtttgtggagctctttgtgtattggagataccatcttcttgtttgatatatttgtatatgtattaagtaagaactggataaagaaggtggttgggatatgtataaatatcaggtaagaacttgataacgtattggttggtttgcatatgaaaagttgccctcactgtcaggttctttcctgtttctaggaattggctagccctggaaggactgccccttccagggtcagcaaattcccaagatagcaaagcatcaaaaatacagaataaaaagacatgcttagtagagtatatagaaatacaattggttttgtttattttgtgatgtatcctgtgatactggtaaattcatttataagttctagtaattttttggtagaatcctcagcatttttgataaatacaatcatgtctgcaaataaaaagttttatttctttcatttcaatctctatgtcttttatttcattttcttaccagattgcattaggtagaacctccagtgttgaatagaaatggtggtggtgagcatcctttccttgttcctgattttatggagaaagcattcaatatgtaatcattaagtaatagaaggttgtttgtagatgatctttattttattgaggaaattcccttctttttctaatttatttccagaaattttatcatgaattggtgttgacttttgtcaaatgcttttcctgcaacaattgggacgatcttatggttttgctccattattctgttaatgaggtaaattgcattgattcattttcaaatgtcaaagcaaccagtatgactggaataaaacccacttggtgatggtgttctgacctttttatatgctcctggttctatgttctattattttgttatgttcatgagaaacatttgcctgtaatttttttttttttttatgatgtgtttttgccaggttttggtattaggataattctggccacataaaatgatttggaaattatttctgcccctctgttttctgtaagagtttatacagaattggtactattttttccttaaatagttgacagactttcccagggaagtcactttggccaagagttttctttgtgggtatgtttttaatgaagaattcaatttattgaagagatatgatactattcaaggtttctgtttcttcctatgtcagttttggtaatttttgtctttcaaggaatttgttcatcaaatctaacttgttaaagtcattggcatgaagttgctcctatctttttatatccacttactgtttataaaatctgtagcgatatcctgctttttttacatcatatggggcacatattggtaatatgtgttcttttctgtttgtaaattgatcatcttagaggtttatcaactttttaaatcttttctaaaaacaaagttttggtttgattgattttctttattgttttatatattattaatttttgttctttattctttcttcactctctggttttgttttctagctacctaggaagcttacataattaatttcatatctttcttcttttccatcataagcatttatagctatacattctctctaaccactattttagctgtattcccccaaattttattgtttattatcattcaggtgaaaataatttctgatttcccttttaatttcttcttcgaacctgggattatttagaactatgttaattttgcaatactgggagattttctagatagttttttgatatttatttctaattcaattttgctatggccaagaatataattcatattaattcagtcttttcaaatgtttgagaattggtttatggaccaacctatggtataacttagtgaatgttctgtgagcacttgaaaaggatgtatgttctgcagttgttgggcattgtgttctgtaaatgtcagttatatttagttggttgatgtttaggtcttcattatttttactgattaaaaaaattttttttgttaattcctgagaaatgagtattgaaatttttagtgtaatagttgttttatttccctctttacatttttgcttcatgtaattggaaactattattgtgtgcatatatatttaagaagagtaatttataaatcttctatgattagtgtttttatgttctgcttacaagaggtcacattggtctgttttccatcttaaattaatatttgtgtaccgtatgaagtagatagaagttaaggttattttttgccccatatgaataaccagttgactaagccacatgttttgaaatgaccaatatttcttcactgaaatgcaatggcacatctgttccaaattaggtaactgtatgtgagtatgtttttttggactctattctgttccatttgtctatttgttcatttttgtgctaataccaatctgcttgttctatctttatgataaatcttgatgtctgataatataaatctttagtttgctcttcaagattgttttggctattgtaaatcctttgtttttcacagactttaggatcaacttgtaaatttccacaaaaactgctaggattttaattggaagtgggttgaatctatagattaatttggaaaagaaccgacatctgaaccatactgagtttttctgtattcttatatcagcatggtctatccctctcttatttagctagcatttattttttgtagaaatgttttacagtttttattgcacagtttttacagatatttccatagatgtattcctaggtatttgattttttgttactattgtaaatgatactatttttaaatgttcatttaaaaaattgtttgcttctgacatacagaaatgcagttgatttttatatattggtcttgcatcttgtgactttgctaaattcactcagtgattggtagattcttttaaatttcctacatatacagacatgtcctctatgaatactgacaattttacttatcctttctaatcatcataacttttatttagttttcttgccttattgcactagccacaatgtccactatggtattgaatagaaatcatgattttagacatgattgttacgtttttgaactctagaagaacaagatcaatattttaccattaggtatattgtttttttactgttaccctttatcagagtgaggaagtttgcttttattcctagtttgagattttaaaatcatgaacattggttaaattttattaggagtagtttctgcatctattgaaatgatcatatggtgtgttttctcattgtgctaataatgtaaaatatattgactatttaaaaaatttttttctaaattacataaaaattgtatatatggtgtacaacatgacattttgttatatgtatacattgcagaatggcaaaatcagtctaattaacatatgtatcacctcacatacttatcttttgtggtgagaacacttaaaatctactcttagcaattttcaagtatacgatatattgttattggtaatcaccatgatgtacaatagatctcttcagtttactcctcctatctaacagaaatttcgtatcctttgaccaacgtctcccattcctcctaatgggaccctcagcctctggtaactgctgttctacttactctctgcttctatgatttctacttttttagattctatggatcagtgagatcatacagttttgtctttctgtgcctagctttatttcacttaatataatgtcttccaggttcatccatgttgttgtaaatgacaagattttcttctttttttaaggctgaattatattctattgtgtacatatgctgtattttctttatcagttcatctgttgatggacacttaggttgattctttatcttggctattaagaataatgctgcaatgagcatgggagtgtagatattgctttgacatattatttttagttccaatacccagaagtgggattgctaaatcatatggtagttccattttaattttttgaggaacctccattcattttccatagtgactgtaaaaatttacattttccccccaagagtatacaagagtttctttttctccacacactcaccaatgcttgttatccttatatctttttgataaggctcattgtaacaggcatgaggtgagatctcactatggttttaatttgcatttagtgatgttgaacgttttttcatgaacatgttggccatttacatattgtcttttttttttttttttgagacagagtcttgctctgttgcctaggctgaagtgcagtggtgtgatcatagctcactgcagccttgacctcccaagcgcaagtgatcctcctccttcagcctcctgagtagttgggactgcaggcatgtgccagcatgcctggctaatttttttttttttttttttttttttttnnnnnnnnnnnnnnnnnnnntcactgtgttgcccaggctggtcttgaactcctggtctcaagtaatcctcccaccttggcctcccaaagttttgggattacagggttgagccactgcacccagtctgtattgtcctttgaggaatatctgttccggtcctttgcccatttttaaatcaggttatttgttttcttgcttttgagttgtttgcatttcttatctattttggatattaactccttatcatatggatggcttgaaaatattttctcctgttttataggttgtcccttcactctgttaattgtttcccttgctgtgtacaagtttttaaatctggtataatgattgatttctaaatgttaactttgcactcctgggggtaaattcatttggtcaagatgtattcttttaaagtgttattggatttaatttgctagtattttgtttagcatttttttccaaatatgtttatgagagagattccagtgtaatttttttccttttcatgtccttacatattttggtatcatgtttatactctcattttaagaatgtgggtaagtgttttttattttctatttcctgagagagtttgtataagctcaatgtttcttcctcagacatttggaaaaatttaccagcaaagtcactgggcattacattttctatgtggaaaagttttaaatggtatattctgagggctctgttctgttccattgatctatatctctgttttgctaccagtaccatgctgttttggttactgtagccttgtagtatagtttgaagtcaggtagcgtgatgcctccagctttgttcttttggcttaggattgacctggcgatgcaggctcttttttggttccatatgaactttaaagtagttttttccaattctgtgaagaaagtcattggtagcttgatggggatggcattgaatctataaatgaccttgggcagtatggccattttcacgatattgattcttcctacccatgagcatggaatgttcttccatttgtttgtatcctcttttatttcattgagcagtggtttgtagttctccttgaagaggtccttcacatcccttgtaagttggattcctaggtattttattctctttgaagcaattgtgaacgggagttcactcatgatttggctctctgtgtgttattggtgtataagaatgcttgtgatttttgtacattgattttgtatgctgagactttgctgaagttgcttatcagcttaaggagattttgggctgagacaatggggttttctagatatacaatcatggtatattcaatttttaaattactgtatttgtttgttctcatattgctataaagagctatctgagactgggtagtttttaaagaaaagttgtttaattgactcatggttccataggctgtacacaaggcatggctgggaaggcctcaggaaatttacaatcatggtagaaggtgaaggggaaaaaagtacatcttcatacagcaacaggaaagagacagcaaaggacgacatgctgcaaaaatttaaataaccagatctcatgcaaactcactcactatcatgagactagcaaagcgtaaatccatcccatgacccagtcacctctcaccaggccactcctctaacactgaagatcataattcaacatgagatttgggtggggacacagaaccaaaccatatcaattatatatagaattattcaaattttatatttcttcttgtgctagtttaggtaaattgttttaaaaggaacttcatttgtttttaaattggagaatattcctgttgtcttttacatgtttcaatattgtaagctctggtaataatgtctactttttaattcccgatattgataatttatgttttatcttctttttttcttgatcagtctttctagtgttttatcaattttaatgcttttaaaaagccaacgttttactttgcttttctttattttatttttatttttctctgatttctgctcttaagtactttcatttttatggtttttggcttaatttgttgcaacttcttgaaatgaaaatttatttaataacattgttcagcctttcttctcgtcttgtgtatgaatttaagattatgaatatcttagtatacacttttactgcgttttactcattttcattattgattcaaagtatttttaaagttattctttgtaccatgggttctatgaaaatatattgattaatttacaaatatatgcgggtttctagttatttttctgtatatgctgtggtacttttgtcagtggttatattttccataagagatttttaatttaggtgccattggcaaatttccattaattcaaatgcagaacttcacatttttcaatgcatacgtgagttttttttgttgaggtattaagaatagcataaatttataaaatattaagtaatcattgaatgcaaaatatgtcctattttgcaacttaatatacttttattaggttgacgctaaagtaattgcgttttttactcatactttaatggcaaaaaccacaattacttttgcaccagtctaataatgagaattattattattattatattgtcttttttttttttggagtggagtctcactctgtcacccaggctgaactgcagtggtgtgatatctgagccttggctcactgcaatctctgcctcccaggttcaagcaattctcctatctcagcctcccaagtagctgggattacaggcacgtgccaccacgcctggctaatttttgtgttttcactggagaacagggtctcactacattggcctggctggcctggaattcctgacctcaaatgatccccccgcctcggcctcccaaagtgctgggattacaggcatgagccaccgcgcctggccctaataatgagaattcttatcaaactgtttacacagaataacatgagtgggtaatggtgaagctgagtttcacatttttatgcgatattcttcagtgttgctatttgttcagtacttttaagaattatataaattttttatagtctatacataaagtcaatattatgggtcccaaatatataaaatgtttgcttgttccattgtttatgttttgaatacaaattatattttgtatgatttcattaataatttgttgagaattttatggcctaacatgtggtctactttctaaaatattccagcttcatttgaaaaggatatgcattcttcagttgttaggtgtttgcttttgattgcttgtatttctcagtcaaatgtaggaagtggagattaagaaaagggctggcacttttggtgattgaggaggagaaagtatgagatagttgtcttggatagtggaagagtaaatgttctaaagaaatataaaatgatagttgagcagcactaagggcccatttgagtatgaatctaaagagggaccaatctgaatgcatgtgttttcatcagtgatttttatatgtgtgggtaaaagctctgagtagacagagataaactgaactcttttagagtttctttgttatctttggtgtttggatcctttgctttgatttgtatcggtacagtttttaaaaaattaaatgttatctcctctcagcagatctttttaacatgaacccagcatctttaacaccaataaaatttcttctattatttttcttccctgtgttttcattcgtcctccatctagagcttctctttagaattgtactccctggattgatcctcttatttcttacttttatgctcataatatttttttctttctgtctgtctctttctctttctgagtctaggacctgggagtttgtcttgactgtcttccaaattatgagtttgatcctttgagtcgtattattcaactctttcactgaattgtcatctatctctttttctttaatgtatagagaatttattatgcacagccacttgcaaactttaacaagtatgattagagcagcattttctataacagcaacacataagttggaacaacacaaatcttaaaataactggaatggatgagcaaattgggtggtccgaggctcagacatcagcaggtgttaaacacctgtgggaaaggagagaacgatccatttatttatttctataggaaatgcaaaagaggcaaaattaagaaaaatactgcttcatgataaagaataaagccgtgaagaatatccacaaaattgtgtatagtggctacatctgatacagaatggaaacagccaggatagagcagcacaggaacactatgaaatgcccaggctgtcttcattactagtcaggatttttttttttaattttgtaaactttatttattctctgctcctttttcataatctagtgatgctttatgttttcaaaatattcttaaatctctctgagaataccgagaaagattttaaaccaagttatcttccctgcattatctgtttcttctggggtcagttgttttctggtccattttggtcttactcttttattcctacaacccctgccccatccccatcctaactgtaataatccttgataatcattgcatatttatgctttttatgtgtgtgcagacaactgtttttatgcttatagatgccttcctctgtgtattttttttcttcagttaaaattttttttttttgcagtcacagtcttgctctgttgcccaggctggagtgaagtggtgccaacctagctcactgcaggctcaaactcataagcttaagccgtcctcccatttcagcctcccaagtagctagtactacaggtgcacactacatgctggctaatttttagatttcttttttgtagagacagggtctcgcaatgttgccggggctagtcttgagctccaggctcaaacgatcctctcgccttggacttccaaattgctgggattggaggcatgagccatcgcacctagcctatgtatgttttaaatagagtctatttcctctactctgtcattctagtcctatctacttttgatcttcctggaattactgtaaatttctgatttgctgatagcaccttttcttatttgtcggagccgccatgaattcgtttatataaacttttaattttactccttttagctactgttgttacctgttttacttttatatctattttaagccctaccatacaccgttattattcatgctttaaacaattgtcagttgtcttttttttttttagacggagtctcgctctgtcgcccaggctggagtgcagtaaacatgacctccgttgcaacctctgccttcggggttcaagcaattctcctgcctcagcctcccgtgtagctgggattacaggcgtgtaccactatgcccggctaatttttatatttttagtacagacagggtttcaccatgttggccaggttggtctcgaactcctgacctcaggtgattcacccgcctcggcctcccaaatgctgggattacaggcgtgggccaccacgcctggctgtcagttgccttttaatacatttaataaatggaagaagaataatattataattaatcacatatttactatttttgagctcttcattcctttctgtaaacctgagtttacatgtaatatttcctttaatccacatgattttctttatcagttcttgagtgtgagtttgttggtgatgtactctctcagcatccatttatctgaaaacatatttgttttgccttgaattttgaaaattcttattttttataatacaacagatccagtagtatgagaattatttttcaggattgtagaattctgggttgacagctttccccctctccctaccagtactttgtcttctggcctccattacttctgaagcgatgtcagttctatttcttgtcttggttctcctgtatgtatgtgactgcttttaagattatctttttgtctttggtttttagcagtttggctataatgtgacttaagtatggatttgtatagattggattcagatgaactttttggatcggtggtttgatttttttaaacaaacttggaaaacatttagccagtattttttcaagtatttcctctgttccacttatatgtatcagactttgttactcttgttgttcagtggtgtgatcacggctttctgcagcctcaaactcctgagcgcaagtaatcctcctacctcagcctcccaagtagctgggactacgggcacagagcaccatgcccagcaaattaaaaaaaaatttttttgtagagatggggtcttgctatgttgccagggctagtcttgaactcctggactcaagcaatcctcctgccttggcctcccaaaatgttgggattaaaggcatgagccatgactcctggcctagatttcttgatattgtagagtttacatatggcttctttatcttcatgcattatattaattttttactgtaaattctattacatatgtatcatagtaaacaaagtctttaaaataaattctaatatttgggtctgctttgggtccatttctattatatatattcttcttttcatgtttaataagtttcagctgactattgtacattgtgggtgatacagtgtagaaactccggatgatgtggatttcaatctttctctgaagtaatgagttttgttctagcaggcagttaaatttactagcagaccaacttgatcctgcggaggcttggttttaggctttgttgggacaggtctatttcagttttgccattacttctggtaagtggctcttattcttcaagtgtggcttttctggcgtttcagtggaaagcctgagatatttaccagttccctctaacactaaatcctgactctccaggaccagatagctgttgaaatctcttcccagttctttcagatttctagctattgcctgtccctgggcttcgattttcatcctatggatgggaattcaggagtcaggccccactgactcccattttcctgagatttctgccctcaatttttggcttttctagcagctccaaacttcattctctgatactttcacccagtaagactgcagctttttacaagagctctgtcccctcctctggcccctgcctgtacacaacagactgtgtatgtagttgtctcaggatggaagaagagtaagtatgggcctcattcagtgtattccccttctttcaagggtcatatccccccgatttgtatctgcttttgtttctttgacaatgccttcaaatggtgtttttataaatatatatttttaaaaagtttataattgtcgtcatcaggaacattagtgtagtataaactactctctcattatcaaaaatctgtatgttaaaaattacttaaaattgttgttatttatcatttccttggtgtttggggcagaagggaatgcacatgatttttctgaacttctcattaagggaggcaacccagccttggtctggagatcccgaaattataccgtatgtataataaaataattattttgttatttttatgagcatagcattaataaattaaatatttagtaagatttgtatctcaggatttttctacctgctaagaatagatcgtttgacaaggcagatgaggttctttgttgaattataaggtattgaagcctataatttagtagtggaaagagcacatagcaagagttgtatgatgaggttggagaggtaagcagcaaacagataatggaattttagtctaaacattcgtaaaatatgagggtggctcctgtgggagattaggttattgggaggcaaagtagacttagggaaaatagttaggaggacattgcaatagttcaggagagaaataatagctgtttagtgtatgatggtagttgtggaaaaaaaagccaatggatggatttgaaatatagtttggaagtaaaactatcagtacatattgatggactggatataggggtgaaaaaagagaagaataaaggttgaccaaattctttattatctcaaagtatgaaagcttgttaagacctcttttctgtttgtattttctttcttgctcaataagaaaacaacccaaagcactttttttctaataacttatatcttcttcttttgtgataaaaaaaaataggagtggtctttagagtacaatacaaaattcttttacatttcacctcaccatatttaggtttaccaaagtagtataggaataattgtaggaaaaacatagtatatctacttggactataaaattttggtatactaaagaaagtaaatcaaaatggttatatcttgcaatagaatgcaaaatcacatggatattaaaggtaaacatttaaatgtattttatattcttggcttcttcttcagaccactccattgccttttgggacatttctgtggaaaagttgagaagcactgacctatctgaaccttccaatccagccaaacttgtctctactttgttccaggaacatgctgtgtacattcctctttccatgttttgcatgcttttctccctgccaataatgccctgtttttcattacttgtcaaaattctattttccttttaaggtccagcctatgttttaattgttgtgtgaaacttctaaaacctttctttgttttaaataattatgatcattttcttcttgtcattttgtagcacttaatttttaaaatttattttgtacttagatgatgtgtaatttactataaatcatagatttttaagaattgggaggaacagcggaaatttaattaagtaattttattatacaagtgaggaagctgagattcatttgtcatgtaagtagtttgcaataagaaaggatgaaacttatttttaggtctcttggctcccaggttagtaatttttctaatctactgcattacttcttcatgtatatttattgatctgaaaagttgtgtctcttagaattatgtagtatatgagtaaagtttgaaaatatgaacttttaaaatgtgatatttgaggtactggtttttgagtgtatgtgtacagttgattaaaatttattataacttttatttactctttctttttttttttttttttttcgtagagacaggttctcactatgttgcccaggctggacttgaactcctgagctaaagtgatcctctcaccttggcttcccagagtgcagggattacaggtgtgagccactgtacccagcctcttatttactctttattcaacagatttgttaatcaacacatgttgaccagacttaattacagcttttatatactcttcatttattcaacaactttcatgtgtcagagagtatcctaggcactgagtgcagtagtaaataatacattaaggttcttaccttcaagaaactttcattctagtggtacaagacaatgagcaaaatcataatctaatctatggtgggaaaatatcagaacagctgtggccacttgagtggttggagcagggactgatggagaaggagcatggaagaactttctgggatgctgataatttcttagggctttgggttacataggtatatgcagtgtccaaacttattgactggtacacttaagatttgtgcatttgattgtatttaggagggaaaatcctgtaaaactagaatagatgtaacttatatgagagttataaatgacaatatgttaaacacccatgaaactaccacccaccccaggaactagaatgttgccagcaatttgcacctacatatgtgtttctccctagctattctcctgtctatcttgcagaagtaaccattgtgtattgtattttgggattaacatttccttgattttttattttttttttgcgggggcggggggagatttgtttaacacatgtatatgcctaaacaatgtactattcagttttgcttgtttttgaaatttagaaaaacggtattttacagcttacagttttctataatttactgcttttgcaacattgtatttttaagatttatccatgttgcataaagctatagttcatttattttaacaactgaggaacagattctgtagtataaatgcacaaaagtatttacctattttcctgatagtttgggttgtttgcagtttttgccattggaagctgaggcgcaatgaatattcttgtaatgtgtctcttggtgtaaatatgcatgaagtttgtaactagacgtagaattgtagcagttctcagaacgtggtctctagaggatgcctgggtatcctaaaaacctattcaagggtttaatgaaattaaaatgattttcataataatgccaagatgttaaatgtctttttcattgagttgacatatgcacaaatggtacagaagtaatagtgagttaaacggctggcaccttagcacaaatcaaagcagtaatgctggttgtagttgtgatcattgtattctttttctttttcttttcttttttttttttttgagacaaggtctcactttgttactcaggttggagtgcagtggcatgagcacaatcactgctcactgcggcctcggtctcctgggctcaagtgatcctattgttttctttctcgtcatgtacttccaggaaaagaaaaaagccaattcgagtcacttattcttttgattctttttcgtagcaaagcatcaatgcattttctaaatgattgaattcatttaaattcgggaaacatttactgagtgcctatggaattctgggatatgagtgtatgtttaaggcagtgtgatttccagttaccatcctttctgttctaaacacgattgtgtcatattaaaatataaaaagagtaaaaaatatcctgaataaaaatagatcaagctgtacatatatatagattataagtgcaaaatactgagtgtggttaaagcctatgctatgcttgctgggtttcctgtacagaagtaggcattggagacagttttgctcttgtggtacaacatggatgactagaggcaggtccaggatgttacttttactgccagccgtcgcttccctccaaatagactattggaaggggaacctcccgccaaacgctgcctactgctatagtgttggataagttgcaagcttaggaagatgagatgacatgatttaggaacttcaggatgaagtgaagtatctcctgccttgtgactgactggatctgcatcgtatcagatacctcctcaaggcaggaattttaacctgctgttataagacctggttctatatatggatagcccaggtaggctaagttgtggcagccacagattgttagatgaggagggacaccacagactgtgtatgtgtgtgtgttgagggcaaggtgaggtgaggaatggtgcaatgagcctgcaaaccaaattgcaaaatatatgaagaaatgtagtgctaagaaaaatagtcaacaaaattaaaaattgaaaaatgaattttttcctgataaaatttaaaaatgtaagtaaacctctaattgaagtgtaacacacaaacaggaaagtatgctactcataaatgcacagcttaacaaattttcataaagtgaacacacctttgttaaccactacttagatcaagaaatagagtatcacctgaattactggcaggaggcaccccagaggtctccctgtacctcctgccagttattctccatgccctcccactatcccaaccctgccaagctaaccattatcctaactttttttcaccatgagaaagaaatggaaggatatggaagtgagcttgagaggcctccatggtcagtgaacagttctgctaaaataatttagagggaataacaaagaagtagcatttgacggcatagtagctgagaatttcctagaatagaaaaaagacatgaatctttagattaaaagtatgtagtcatttttgatcaagataaagaagaatctacatcaaaacctttccaaaaatattgcagaacattgctgctaatgcaaacaagttttaaactacttgagggaaagccatgacatgtaggagtgatagcagacttcatatttatgttaatagataccacaaaacaatgcagtaatatctttaaagttctggggaaagaaaattataaataggattttgagagtgagggcaacatatttttttcaaagactacaacttaaaaacccacagagccccactgaaaggtctactaaaagatacatttcagcaggaaaaagtgagtcctgaaggaagacccaaaacaatgatgagcacaaaacaatccaaagtcagtggtgggcacaaactgataaaattctagcaaatttactccttaatgctaagaacttcgtttaaattaactttctatcttttcagaaaaccaactcttagatttgttaatcttttccatcatttttatagtttctatgtcatttatttctgctgtgaacttcattttttccttccttctgttagctttgggctttgttcttctttttctagttccttgaggtgtaatgtaatgttgtttgacatctttcttcctttttgatgtaggtatttattgctataaacttccctcttataactgcttttgctgcatttaatactgactataataagatacgatgtaatagatttcaaggaattatgtatttttgaataaattaattctttaaagttgcatatccagttgcagatgaacttcaaaaatcttgcagttttatatctgttacagtaattgccaggttttgttgttgttgttttgatacattagaagttctagaattgttatatcctcttgatgaattaatccctttatcattctagaattaccttgtctctttactgtttgtgacttaaagtctgttgtatctgatatacctttgcatggaatatctttttctatccctttactttcagtctatgtgtatctttaaaggtgagatgaggttttgtaagtggcatgtagttgggtcatgttttttagtccatttagccattctctatcttttaagtggaaagtttaatctatttacattcaagtttattcttgatatgtgaaggcttattcctgtcattttattaattgatttctggttgttctgtaggtcctttgttcttttctttctctcatattgtttagcattgtggtttgttggttttctatagtgataacatttgaatcctttcttgtctgtgtgtgtttgctttaccagtgggtttgatactttcgtcatctgtttttcataatggtagtaattgtcctttttgtttgtttgtttgtttcttttttgagacagggttttgctcttgttctgtcctccaggctggagtgcagtggtgtgatcatggctcactgcagcctcgacctccatggtctcaggtgatccttctgcctcagcctctcaggtagctgggactacagaaacctgccaccatgcctggctaattcttttgtatttttcgtagacatggggttttgccatgttgtccaggctgctcttgaactcctgggctcaagcagtctgcctgcctcagccacccaaagtgctaggattacaggcttgagccactgtgcctggcctgacattgttctttgacttccatatgtagaactccctcaagcatttcttgtaggtctggtctagtagtgttgaattcctcagcttttgcttgcctcagaaaaactatttttcctttgcttaatgaaggataattttgctgggtatagtatccttgacttgcaggtttttttctttcagcacttttcatatatcgttccattctcttcctggcctgtaatgattctgctgagaaatctgctgttagtctgatggagcttcccttagaagtgactagactcttttttcttgctgtttttagaattctctctttgtctttgacaagctgttgtctctgacaacagttctctctttgtctttgacaaactgttgacagtttgactctaatgtgttgtggagaacctgttggaattttgtctttttggggatctctgagcttctgtatctgaatgtctaaatctcttgatatacttgggtagttttcagctattatttcattaaccaggttttctattccttttgtattttcattgtcttctagaatactgaaaattctaatattagtttgctttatggtatcccatatgtcatgcaggctttgttcattcttttttctttatttttgtctaatggggttatttcagaagacctgtcttcaagttcagaaattctttcttcgtagatgctctagaatgtattttttatttcattaaatgaattcttcagtttcagggtttcttgttttctttttaaatgatatctctctctttggtaaatttctcattgatatcctgagttgtttttctggtttctttgtattgtttatctgtatgcgtttgtatctccctgagcttctttaatatcattatttttaattctttttctggcatttcatgaatttcttttgcattggaatcttttggtagaaaattattttgatcctttggagatgtcatatttccctatgttcccatgtttcttgtgaccttacttctttgatatccacacatctggtgtaatcatcacttccatttttttgaatttgctttcatagggtaggactttttcctgaagatttgactggggtgtttgttggccagggcactttgggtttgaatctgggtgcatgcagtagtgtagtctctgtaagattttttttcctttgtaaacagcatcagtggtgtctgtgatttcctcagtggcatagtgtgtggttgtggaggctgtggtgaacttttgctggggatggtgacaccagctggactgatcctcagtcctcagttgtggcagcagttggacaaccatgcctgtacattagccccagggtggcttacattagtaatggtgttagtgggtccaggcagtccaatttttgggtctccaggtgacttgtttgggtaccaggagtggcagtgatgggctgggcagctgagtgggtccacaggcccctgggcagtgagcatggcatgggttatgtcagtagcagtggtaggagaacctctggctgtccagttgtctgtgcttatgtcggcagtgacggcgattggctgggtaggcaagtcctaaaacctgcaggtggcaagtgtgagtgggaaccagctgtggtggtagtggcaggttgggtgggccacatcctcagacccccaggtggaatgctcagttgacactggacgtggacaaactggtgcgatcccaaggcccccagataacatgcttggatacgtgggagtggggtgctgagctgggcagggtgagagtatcctcaggccctccagtggtgttagcaggtgctgtttgtggtgggcaggagcaggatgatttccaatttcctggtggaatgttcaggtgggggcagcagtggctgtgctgtgccctgatgctggggagggtgcggttgctgtcagtgggagcagttgtagggagttggctaaggagtgtgcactgcagctgcaggtggaggctgtagatgtgatgaagctgtactcagggtgcatgcaaatttgcattttgacacctagcggcagcagcctgcaatggtggcagctgtaggtggtagagcttgtcctcagggcacataccaatatatggcagcccttctgctgggagcagtggggttattgccaatggcttgtgctttggtcccagaggcggcagccagcaatggaggtgactgtcggtggaggatgtcagtggggctctaggggtgtggatatgcaggggctgttgggctccagggtaggaggcattctggtgtgggttgggctttaaaaatggcaccgtgctgtagctgcttaggactcaggggtgtgttggaccagcataagctccctctctaaagcaatgtcattgtgcagtctccaggcagctccctatgttactcccagggcccatgaaagttgacgggctctcttgtgtctgggattgcaggagtttgcagtgaaaatgtgggccactgggagtctctcacttactctttccccacattgtgcaggctctctaggcttctggctgatcctggctgagcaggctgccccacttccctctccttccttgcattaggtgttttctatcacttctctgttgaatttccgtgttctctcttagatgacctattcaaagtgtgattatctactcgctattttggttcttctttgtggagcaggtgagtaccagataactctagtcaaccttctggacccctcttcccccaatttgagatctcttcttctgttgtctgtaactgagtttaatgcttgtttgttcatgttaggattttatatcatcgtcctcaattaggttgttaactggaattttataatctttgtccacaggaagtttaaaatgtatgatttcttgcattgtgctttgtatgtagtaatacacgatatttatccagttaatggatttgacagccattgctgtcaaggagcagtccttctttgtgtatgaagggtgccttatcaatattatttccatttgtaactttatttatttatgtattcatttttgagacagggtcttgctgtgtcacccagactggagtgcggtggagtgcggaggtttgctgcagcctcatcctcccaggttcaagcaattcttccgctccactcccagagtagctaggactacaagtgcgtgctgccacgcccagctaatttttttcttttgtatgtttttgtagagatgaggtttcaccatgttgctgaggcttgtctccaacttctgggctcaagctatctgcccgcctcggccccgcaaagtgctaggattacaggtgtgagacactgcgcccagcccatttgtaactttattgttttctcttacaggcaaatgttctgaaaaagactctgcatgggaatggcctgccttacgatgacagaaatggagggaacatccacctcttctatatatcagaatggtgatatttctggaaatgccaattctatgaagcaaatagatccagttcttcaggtgtatctttaccattcccttgggaaatctgaggcagattatctgacctttccatctggggagtatgttgcagaagaaatctgtattgctgcttctaaagcttgtggtaagtattaaaaaacagcattttcctttttatgcatggattgttttaattatgctatgctaatactaggtacatgcataatatatatttttatttttttaatgcttgtatggctggcgtgtgtgttttcacatgcatagaaaatgaaagtgttactggagtacaatttatggtgaatctgccttgggctaggtatcaaaacaaattgatgcccataaatgtttgctgactattctttataattacatataaggtggttaaaaaatcctgtcatgggctatctcatgacataaggtaatattaaagctagatcctgagagcaacatgaaagcaaaaaattaatgttttgaaatatgtatttgatttaaaatcttgattaaatggctgacaaaccatcattttcttctagttagcttctgaagacctctgccaatctttcctcatatatatttcttatgtctttggtgtatcttgaaatcatttttactcttgagacctgattatattatctatggaccaaaactgtgaaccagagaactctttctatagagctaacacattttactagaccactgaggttactatagagcctactatcatggtatctcatttttaaatgttcttttaatagaaagactagttgacactattttgaagaatagtcgtatgattttatttgtagaggcaaattaaatgtctaatatagtatttataagaatgtatgattacatcaatttattctcttatttaagatcagtataggtcagaataaccattaactgtaagttggaggaagctaggtacatttcaagttccttctagctattttgaaaaatacaatacattgttgttaactatagtcaccctactcttctatcaaacatttgaacttgttccttctgtctgtatttttgtgcccattaaccaacatctcttcatttccctcttcccacccatataaccttgccagtctctgctaccaatccactctaccttcatgtgatcaactttttagctcccacatatgaatgagaacttgttatatttgtctttcagttcctggcttatttcactcgacataatgaccttcagttccatccatgttgctgtgaatgacatgattacattcttttttacgatgccactgggccccaggggagtacgcattctgttgtgagctgggcttcaaaatatcaccttgctgtagctgcttaggactcggggggagcgtgggacccagtgtgaacttcctcactggaataggaaatgcttttgtgctgtctctgggcagccctctatgtgaattttttgtcctgcaaggggctagggtctctcctgtgactaaaattccaggggttcacagtaggaatgtggaccattgggcatctctaacttaacctttccctgtgtggagtctctcctagcttcttgccaatcccggctgggcaggctgtcttgtttcgtctccttccttgcttttctgttgaataccagtgttcctcttggataatctactcaaagtgtgattatatactcatggttttagtttttagtggggaagtggatatgagagacctctggtcagttatcttgactatattgtaaagtctgtattttttgttgtgtgtagtctctgaaatctctgatcctttagcttatagtaagattttagcttgtaagatttttttagcttttaagattttttagcttgtaagatattttttagctagtaagattttagcttgtaagatttttagcttgggccgggcacggtggcttacacctgtaatcccagcactttgggaggctgaggcaggcagatcacaagatcaggagatcgagatcatcctggctaatatggtgaaacctcatctctgctaaaaatacaaaaaattagccaggtgtggtggtgggcacctgtagtcccagctacttgggaggctgaggtgggagaatggcatgaacccaggaggcggagcttgcagtgagccgagattgcgccactgcactccagcctgggcgacagagcgagactccatctcaaaaaaaaatttttttttggcttgtaagattcatttttagcatgtaagattttgctttagcttgtaagatttttttttgacagattttattgaattcctagggccaaaagaaaataatagaaaagaacaaaaaactctttcagtctttgcagattggctctgtgttggggctctcattcagtgtttacccagtccatttacaactctgccttagccttcccttcctgcttgtgctgactctaaagaacagcttgaggtgaaagcttagggtcttttcttctaagttctgttccttgggcatgcatatggcttttctactctccaatacatagaaatgcttttcagtgctgtcatttcccaaataaactctcctctgtcatctctgttttggttttcagtgtgtttattgtttgcctcaactttagacctctgccccagatagcaacagcttgttcatttgcaatgttttcaatgaatatcttctgtgaagctgcttttctgccctgagaaagtcctgaattaagtggaacataggtgtgctctttgcatcatttcttcagtcagtccccagtcagggcaaaagagagaaaaacagttttttgagattaaggttggctctgttcactccagagccagggaccagagtttcacactgggagcaccaattgccatcttcaagactttgcttaactagggggagtggagccggggctggtgggcaggacatgggcgtagtgggtggttaagggaaagtaaaaatgctgcacaactttcctgccatttttaagtggctgttttcttgattcagcatttatctgattgctgcatatctttgcctattttctgtagtttatatgaagttcattctgacagtttttactcattttttttttcctgtttctgggagaaggataggtccttggaactacctactccaccattttcactgatgttactcttttacttttctaatcatggaagtaaagtttaagatttttctatctatattggtgagattacccttggtatcgtagtcaaactaaattcacaaaatgtgtcaatttctctgttcgctcttggtctattctctgtgatagtatacttaagatggaattgtctttcatgtttggttgaactcaaatataaatcttgtctgggcctgatggtggttttttctttcttcattgttattttgttattcttcttccttcccttcttctgtctctttcttgctccttctttcttttcttcttcttttgtttaagtggatagagtttgtttcctttttttttttttgagactgagtcttgctctgttgcccaggctggagtgcagcagcatgattatggcacactgccacctccgccttccaagttcaagtgattcatttccctcagcctcctgactagctggactacaggcacccaccaccacacccagctaatttttgtatttttggtagagacggggtttgccatgttggccaagcttatctcaaactcctgacttcaggtgatccacctgcctcggcctctcaaagtgtgtgagccactgcacccagccagaatctatttctttaatggttatagttctgttgaagttttaaattaatgaatctttttaaagttacattttcacaaaaattgtccatctgtctatattttcaagtttattggcataatgttgttctagcactctttgtcttcataacttataattatgctttttaaaagttcttagtgtttatctgtgcctctttttttcttattatccttgacaaagatctattttgcaaagaatcatcttttattttgttacttctccctattggatttttatcatgtccatctctaacctttctttgggattactctattgtcttctactatattgagttagatacttagatcatttgctcttattttctaatataagcagataaagctacaatttttcctcttgagtttcaccttagttgtattccacaatttttagtacatgatattggtaatcattattcattataaatgcctcccaatgtatttttcctttgacttctgagttatttggaagttatttgtaaataaaagaatgaatgcaagtatactgtttaaaagttgctgctaaataatgttattataaataacttaccgaaattattacacatctgtaagtagacggtcgtgttaataatttaaattaagaatttaagtctttcttgtcagtttgtcatttgtgccgtttctatctacagtggaaaatagtgaaaacataactagaataaaatacttttgtgttctgtgagccttatgttttaaatatataggattaaaaaaattttacatattcatttctgatttaattgaagtgtggttagagaacatggtatgaatggttattctgtggaacttctaaagacttgttttgagttcacgtgattgttgtgtttgtgcttgtgtgtgtacgtgtatgcgtatgtgtgaatgttctatatatgcttgaaaatagcttgtattatttacttgtgtggtttaggtattctcttggttttttagttcagtggctttcaaccatttgttgatgtaccttctaaaatatcttttaagaaattacatatgcactcacattttaagttgatatttaaaatttttcattgtaaattaaaatagcccaaaggacataattattaatgtattgtgtaaaacttgacacattgttcttttaagagtattcatgacttctaaatatttttgtgatttgatacctattaattaaaacaactccttctgtgcaaccacatgcaagcatggatttttattatacctccagttcagggaaacttgaaaatttgaaccaacctttctatagaggacaactgaagaaaccagatgaaatgttttaaaaatatctgcttgaaagagtctcagcagttatattttaaaatactgacacacctcggagatattgtgggtttggttccagactatcgcagtgaagcaaatattgcaataaagcaaatcacatgaagttttaggtttcccagtgcatataaaagttatgtttaaattattctgtagtctgttaagtatgcaataatattatgtccaaaaaagtacataccttaatttaaaaatactttattgtcaaaaagcactcataatcatctgagccttcagtgagtcataatctttttgttagtggagagtcttgccttgatgttgatggctactgactgaccagggtggtggctgctgaaggttgggtggctatggcaatatcttaaaataagacaatgaaggttgctgcatcagtggactcttcctttcgtgaaagatgtctctgtagtatgcaatgctatttgatagcattttacccgcagtagaacttctttgaaaataggaagttgattcactcaaaccctgccactgctttgattaagttgatgtagtattataaatcctttgttgtcatttcaacaatattcacagcatcttcaccaggaatagattccatctcaagaaaccactttctttgctcatccataaaaagcaattccttatatgtccaagttttatcgtgagattacagcaattcagtcacgtcttcaagctccacttctaattttagttctcttgttacttctaccacatctgcagtgacttccttcactgaagattaaatccctcaaagatacccatgagagccagaatcagcttcttccaaactcctgttaatgttgacattttgacctcctctcatgaactacaaatgtttttcatgacgtctagaatggtgaactctttccataagtttttttatttactttgcttagatctgtgagaggaaacactgtgacagccataaccttactaaatgtgtttcccaaataataagatttgaaagtcaaattgctccttatccatgggctgcagaatggatgttgtgttagcaggcatgaaaacaacatgaaattcaatgtacatcttcatcagagctcttgggtgaccaggtgcattgtcaatgagtaataatacttggacaggaatctttttttctgagctttaggtctcaacggtggcttaaaatattcagtaaaccacgctatatacagatgtgctatcttctaggctttgttgtcccatttatagagcacaggcagggtaattgagcatagttcttaatggccatagattttcagaatggtcaataagcattggcttcaactaaaagtcacttgttgcattagctcctcagaagagagtcattcagttctttgaaactttgaaggcaagcactgacttctttctagctatgaaactactcctagatggtatcttcttccaatagaaggctgttttgtctacactgaaaatctattgtttatcagtgatctttgttagatctttggataacttgctgcatcctctccatcaacacttgctgcttcaccttgcacttttatgttagggacatggtttcttttcttaaacctcatgaaccagcctctactagcttcttgcttttcttctgcagcttcctcacctctctcagccttcacaggtttgaagacaattagggccttgctctggtttagggtttggcttgagggaatattgtggctggtttgatcttctatctagaccactcaaacttttgtcacatcatcaataaggctgttttgctctcttatcatttatgtatttactgcagtcgcatttttaatttcattcaaaaactttttctttgcattcagaacttgattgactggtgcaggaggcctggcttttagcctctcttggcttttaataataccttcctcacttagtttaattatttctagcttttgatttaaagtgagagatatgaaactctttaatatatgaaactcttcctttcccttgaatgcctagaggccattgtaggattattaattggcctaatttccatattgttgtgtctcagggaatagagaggcctaaggagagggagagacacaggaatggctgttgctggagcggtcagaacacacacagcatttgttgcttatgtttgtcatcttatatgggcacggttcatagcggccccaaatgattacaattgtaatgtcaaagatcactgatcacagatcatcataactgatataataataaaaaagtttgaagtattgcaagaattaccaaaatgtgacatagggacacaaagtgagcacgtgctgttggaaaaatggtgctgacagacttactagattcacacttgctctaaatccttattttgtaaagaaaaaaaccccacaatatctgcaaagtacaataatgcagggtgcactaaaatgaagtatgtttgtataaaaaaagattgtgattaataattcagttgtaggggttggtatatcaaaagatttcgactgctattacattttgttccgattttaagagttgttactttagcttcatttcaaattataggtgctatgtaaaaatattctgttgtgtacctttaataattcctttctctgcttcttttctaggtatcacacctgtgtatcataatatgtttgctttaatgagtgaaacagaaaggatctggtatccacccaaccatgtcttccatatagatgagtcaaccaggcataatgtactctacagaataaggtactttcttcagtaaagtaactcacttaatgctaaaaggcaaaatgggagaaattatcaaatattttttaattgcaaggtacttaataccagatacctgaaccaattagttagcactcatttaagatttcatttaagattctattctgtttctccatcagagaaactgtttatacatgttgtgtaagtagaatactctgagaataaagctgttttggtgggatgccacttaactccttatgattataattaaataagtaaacaaaatcacagtggcctttattaacaaaatcctaaatgtttgggatattgctggtttgtgcagcgttttgtgcaatagaatgcaatttcacatcttatctttataaagaactttttaaaaagttgacgtgaagaaaagagacttttcccagtgtgtatttgcagcctcaaattgtaagttaatttatataatttatggtaatgtgtaatgcctatttagagaaatctagaagtatttttttgctcgaaaggatgaaacaaagatacgtttgatttgtgtctcacaaatacctgtgatttttctaagcatttatatacatatatatataattcatcataacttcatgaggtgttaagatttccacattaaagataaagaatttggagcactgagaagtaatattactcaaatttattcatggtcacacaggtaggaattgggagtcaggttcaaatccaagcctggtttgcttcataagcttgcctcttaatcacctcatgtgtacttcattaaagagataatgtatatataatatttattattgtgcctatcacttggtgctctctcaataaattttagtattgttttgcttctttctcttcccctattctatataaaaatatgcagttggatgtgtttgcatttactgatgtctaatgtataatttgcactgagttcaaaaaaatattttttatataattattgaaaagacaattggtgaaaaaaataaatgttcaaagaaataatagatgtacaaaaatcaacagcattcttatatgcaagcaaccagttatataatagataaagaagatcctatgcagtgtagctacaaaaacccttaactaaccaggaatggtcttaataagaaaaaacagaagacagtataggaaaattagaaagttatttgaagaatatgaagaattaggacataacattggaatggggagatggaatattacaaagatcaatttctcttatgctatatccttagctctaagccaatcaaaatcctaacaaaggcattttacggaatttgacacattactatgtaaattgagaattattaaataagatagccatgagaaagaagacttacctggcaattgtaaaatattttgtcccaggagatattttcacattatatgaaactacaaaatggtatctattattaaagccacataattaaattcagaatcataaactaaataatgagaatgatggggccagtatatcttgaaagtactccttcatacatatagaaacataataatatgaagaaatcttttcatattaacgtggaagggagagattagtcaacaaatggtggtagaatagttgattagctgtttgaataaaattttagcttcttactttataatgtatatcagataaattatagattgattaaagatcagattgatatgtaaatagaaatgtaaagaaaatcaaactataaaagtctgaattggaactgaattcaagtccttgggaaaataccatttaagttgcaaaacaatagaaaaaatcatatgggaatgactgcaattgtcaactataaaaattttcaaatgtctgaaggtttcctcttaaaatgaaaaggcaggagggtggagccaagatgactgaataggaacaggtccagtctacagctcccagcatgggcgatgcagaagacgggtgatttctgcatttccaactgaggtgtaccgggttcgtctcactggggagtgtaggaaagtgagtgtaggacagtgggtgcagcacactgagcatgagccgaagcagggcgaggcatcgccacacccgggaagcgcaaagggtcagggaattccctttcctagtcaaagaaaggggtgacagacggcacctggaaaatcgggtcactcccactctaatactgcgctattctaacggtattagcaaatggcacatatcccgcgcctggctcagagggtcctacgcccacggagcctcgctcattgctagcacagcagtctgagatcaaactgcaaggtggcagcgaggctgggggaggggcgcccgccattgccgagggttgagtaggtaaacaaagcagccaggaagctcaaactgggtggagcccaccacagctcaaggaggcctgccggcctctgtagactccacctctgggggcagggcatagccaaacaaaaggcagcagaatcctttgcagacttaaatgtccctgtctgacagctttgaagagtagtggttctcccagaatgcagctggagatctgagaacggacagactgcctcatcaagtgggtccctgaaccccgagtagcctaactgggaggcacccccaagtagggggagactgacacctcacatggccgggtactcctctgagacaaaacttccagaggaacagtcaggcagcaacatttgctgctcaccaatatccgctgttctgcagccactgctgctggtacccaggcaaacagggtctggagtggacctccagcaaactccaacagacctgcagcagagggtcctgactgtcagaaggaaaactaacaaacagaaatgacatccacaccaaaaccccatctgtatgtcaccatcatcaaagacaaaaggtagataaaaccacaaagatggggaaaaaacagagcagaaaaactggaaactctaaaaatgagagcacctctcctcctccaaaggaacgcagctccttaccagcaacggaacaaagccggatggagaatgactttgacaagttgagagaagaaggcttcagacgatcaaactactccaagctaaaggaggaagtttgaactcatggcaaagaagttaaaaaccttgaaaaaaaattagacaaatggctaactagaataaccaatgcagagaagtccttaaaggacctgatggagctgaaaaccaaggcacgagaactacgtgatgaatgcacaagcctcagtagccgattcaatcaataggaagaaagggtatcagagatggaagatgaaatgaatgaaatgaagtgagaagagaagtttagagaaaaaggaataaaaggaaacaaacaaagccttcaagaaatatgggactatgtgaaaagaccaaatctacgtctcattggtgtacctgatggggagaatggaaccaagttggaaaacactctgcaggatattatccaggagaacttccctaatctagcgaggcaggcaaacattcaaattcaggaaatagagagaacgccacaaagatactccttgagaagagcaactccaacacacataattgtcagattcaccaaagttgaaatgaaggaaaaaatgttaagggcagccagagagaaaggttgggtaacccacaaagggaagcccatcagactaacagcagatctcttggcagaaactctacaagccagaagagagtgggggccaatattcaacattcttaaagaaaagaattttcaacccagaatgtcatatccagccaaactaagcttcatatgtgaaggagaaataaaatcctttacagacaagcaaatgctgagagattttgtcaccaccaggcctgccctaaaagagctcctgaaggaagcactaaacatagaaaggaacaactggtaccagccactgcaaaaacacgccaaattgtaaagaccatcgaggctaggaagaaactgcatcaactaatgagcaaaataaccaggtaacgtcataaagaccggatcaaattcacccataacaatattaaccttaaacgtaaatgggctaaatgctccaattaaaagacacagactggtaaactggataaagagtcaagacccatcagtgtgctgtattcaggaaacccatctcacgtgcagagacacacataggctcaaaataaagggatggaggaacatctaccaagcaaacggaaaacaaaaaaaggcagggattgcaatcctagtctcggataaaacagactttaaaccaacaaagatcaaaagaaacaaagaaggccattacataatggtaaagggatcaactcaacaaaaagagctaactgtcctaaatatatatgcacccaatacaggagcacccagattcataaagcaagtccttagagacctacaaagagacttagacttccacacaataataatgggagactttaacaccccactgtcaacattagacagatcaacaagacagaaagttaacaaggatatccaggaattgaattcagctctggaccaagcagacctaatagacatctacagaactctccaccccaaatcaacagaatatatattttcagcaccacaccacacctattccaaaattgaccacatagttggaagtaaagcactcctcagcaagtgtaaaagaacagaaattataacaaactgtctctcagaccacagtgcaatcaaactagaactcaggattaagaaactcactcaaaaccactcaactacatggaaactgaacaacctgctcctgaatgactactgggtacataacgaaatgacggcagaaataaagatgttctttgaaaccaacgagaacaaagacacaacataccagaatctctgggacacattcaaagcagtgtgtagagggaaatttatagcactaaaggcccacaagagaaagcaggaaagatccaattgacaccctaacatcacaattaaaagaactagaaaaccaagagcaaacacattcaaaagctagcagaaggcaagaaataactgagatcagagcagaactgaaggacatagagagacaaaaaacccttcaaaaaaatcaatgaatgctggagctggtgttttgaaaagatcaacaaaattgatagactgctagcaagaataataagaaaagagagaagaatcaaatacatgcaataaaaaatgataaaggggatatcaacccgatcccacagaaatacaaactaccatcagagaatactataaacacctctacatgaataaactagaaaatctagaataaatggataaattcctggacacatacaccctcccaagactaaaccagaaagaagttgaatctctgcatagaccaataacaggctctgaaattgaggcaataattaatagtttaccaaccaaaaaaagtccaggaccagatggattcacagctgaattctaccagaggtgcaaagaggagctggtaccattccttctgaaactattccaatcaatagaataagagggaatcctccctaactcattttatgaggccagcatcatcctgataccaaagcctggcagagacacaaccaaaaaggagaattttataccaatatccttgatgaacattgatgcaaaaatcctcaacaaaatactggcaaaccgaatccagcagcacatcaaaaagcttatccaccatgatcaagtgggcttcatgcctgggatgcaaggctggttcaacatatgcaaatcaataaacgtaatccagcatataaacagaactaacggcaaaaaccatatgattatctcagaggcagaaaaggtctttggcaaaattcaacaacccttcatgctaaaaactctcaataaattaggtattgatgggacgtgtctcaaaataataagagctatctatgacataccgacagccaatatcatactgaatggacagaaactggaagcattccctttgaaaactggcacaagacagggatgccctctctcaccactcctattcaacatagtgttggaagttctggccagggcagtcaggctggagaaggaaataaaggttatttgattaggaaaagaggaagtcaaattgtccctgtttgcagatgacatgattgtatatctggaaaaccccatcgtctcagcccaaaatctccttaagctgataagcaacttcagcaaagtctcagcatacaaaatcaatgtgcaaaaatcacaagcgttcttacccaccaataacagacaaacagagagccaaatcatgagtgaactcccattcacaattgcttcaaagagaatacctaggaatccaacttacaagggatgtgaaggacctcttcaaggagaactacaaaccactgctcaatgaagtaaaagaggatacaaacaaatggaagaacattccatgctcatgggtaggaagaatcaatattgtgaaaatggccatactgcccaaagtcctttatggattcaatgccatccccatcaagctacagatgactttcttcacagaattggaaaaaactactttaaagttcatatggaaccaaaaaagagcccacattgccaagtcaatcctaagccaaaagaacaaagctggaggcatcacgctacctgacttcaaactatactacaaggctacagtaaccaaaacagcatggtactggtatcaaaacagagatatagaccaatggaaagaaataatgctacctatctacaaccatctgatctttgacaaacctgacaaaaacaagaaatggggaaaggattccctatttaataaatggtgctgggaaaactggctagccatgtgtagaaagctgaaactggatcccttccttacaccttatacaaaaattaattcaagatggattaaagacttaaatgttagacctaaaaccataaaaaccctagaagaaaacctaggcaataccattcaggacataagcatgggcaaggacttcatgtctaaaacaccaaaagcaatggcaacaaaagccagaattgacaaatgggatctcattaaaccaaagagcttctgcacagcaaaagaaactaccatcagagtgaacaggcaacctacagaatgggagaacatttttgtaatctactcatctgataaagggctaatatccagaatatacaatgaactctaacaaatttacaagaaaacaacaaccccatcaaaaagtgggcgaaggatacgaacagacacttcttgaaagaagacatttatgcagccaaaagacatgaaaaaatgctcatcaccactggccatcagagaaatgcaaatcaaaaccacaaagagataccatctcacaccagttagaatggcgatcattaaaaagtcaggaaacaacaggtgctggagaggatgtggagaaataggaacatttttacactgttggtgggactgtaaactagttcaaccattgtggaagtcagtgtggcgattcctcagggatctagaactagaaataccatttgacccagccatcccattactgggtatatacccaaaggattataaatcatgctgctataaagacacatgcacacgtatgtttattgcggcactattcacaataacaaagacttggaaccaagctagatgtccaacaatgatagactggattaagaaaatgtggcacatatacaccatggaatactgtgcagccatgaaaaatgatgagttcatgtcctttgtagggacatggatgaagctggaaaccatcattctcagcaaactatcgcaaggacaaaaaaccaaacactgcatgttctcactcttaggtgggaattgaacaatgagaacacatggacacaggaatggaacatcacataccggggcctgttctggggtggggggatggaggagggatagcattaggaaatatacctaatgttaaatgacgagttactgggtgcagcacaccaacatggcacatgtatacatatgtaactaacctgcatgttgtgcacatgtaccctaaaacttaaagtataatagaaaaaaatgaaaaggcaaattgtaaagatagtttcaacaaatcaaataaacataaggttagtattcttgtaagtatgaaatttaaaacagtgtatccatttaacaattacttaatgtacatgaatatatagcgtcactagttatgagaataatgaacgagattgcttgctttagcacatagttacaactattcattattcttataactagtgatgctgagaattttttgaaaaggccattaatgatttgttcttcttttgttaaatatttcttcatgtacattaaataattgtttaatggatacagtgtttttaatgccaacaaattagaggatcaagatgaaatggacaaattcctagaaagacacaagttataggaactgctaaaagaaagaacagaaagtttgaataggtctatgacaaataaagaaatcaaattagcaatttttataaaagcccaggcccaagtggcttcacttgtgaattctatcacacattaaaaaaattattactagttattcacaaaaaatagaaaaggaaggaggatttctgagctctttctgtgagttcagtattaccctgataacaaattcagacaaagatgtctagaagaaaagaaaactacagaccaatgttgtaggtagaaaatcaacaaaatacttgcaaaccgaatccagcaatacagcttgaatatgtcttatctgaaatgcttgggaccagaagtgttttggattttagatttttttttttttttttggattttagaatatttgcagagtatacgctggttgaacatacctaatataaaaatctaaagtctgaaatgctctgatgaatatttcttttgcacatcaggttagcgctctaaaggttttgaattttggagcatttcggatttcagattttcaggttaggaatgctcagtttgtttataaaaagatgaaatactatgaccaggtgggatttatcccaggaaatacaaggctagtgtaacttccaaaaatcaatcaatgtaatacaccacattaatagaataaatgaccaaaaccacatgatcatcccaagagacacagaaaaagtatttgataaaatccagcatcccatcattataaaaaaactcaacacaataggaatggcaaggaacttcctcaatttgttaaagggcatctgtaaaaaattcaaaagtaatgtcatacttattagtgaaagactgaatgccttttccctatgatcaggaatgagatgaggatagctacttttaccactttgatttaacactatactgtagattcagggtagggaaattaggcaagaaaaagaaataaaaggcatttatattggaaaataagaagtaaaattgtagtcatcccgctgtatccatgggtttcacatccatggattaaaccaactgcagattgaaaatacttggaaaaaaagttgtgcttacactgaacatgtacagactttttcttgtcattactccctaaagaatacggtataacaactatttacataacatttacattgtattaggtattataaatagtctagagattttaaagtatactgaaggatgtgcacaggttatatgcaaatactatgcctttgtatatcaggaacatgagtatttgcagattttggtatgtgtgggaggttctggaactagtactgcatagataccaaaggatgattgtgtattcacagattacatgatcttgcatattaaaaatcctaaggaattaataaaaaaactattagaactaataaatgagctcaggtcagttgcagaatagaagatcaatatataaaaatcagttgtatttctatacagagacaaagaacaatccaaaaatgaaattaaaaaaatttcattaacaatagcataacaaatttttaggaataaacttaaagaagtgtaaaatgtatacactgagaaatataaaacatcattgaaagaaattaaggaaacacctaaataaatggaaagatatctcatagaggacttcatatttttaagatggcaatactccttaattgatctgtatgttcaatgcaattcctactgaattcctaaatgtctttattgcagaaattgacaggttaatcataaatttatataaaaagcaaagggacttagcatagctaaaacaatcttgaaacaatacaaagtttgaagacttatacttcctaattacaaaatttattacaaaaggactgtaatcaagacaatgtgatactaaaggatgaatatacagattaatggaaaggaattgacagtctcaatataatttctcacattgatggtgattgatttttgatcagggtgccaagacaattcatgggcatagaatagtcttttaaactaacagtgcggggacaactggatatccacatgtaaactaatgaagtaagacaatctacttcacactatatacaaaaaaaaaaagcttaaagtggatcataggcctatatatgagagctaaacttattaaaactccaagaagaaacacagaagtctttgtgtacttagattaggcagtggtttcttagatatgacaccaaaagctcaagtgacaaaagaaaaatagttaagttaggctttatcaaagttaaaaacatctgtgtgtcaaagcacactatcaaaaatgcgaaaagaccacccacaaatgggttccacaaaatggaagcaaatgtttgggaatcatatatctgataattgtcttatctccagaatataaaagaattcttacagctcaacaagacaatgacaacttaatttaaaaagtaggcaagggacttggatagacatttttccaaataagatatacaaatggccaaaaagcatgtaaaaagatgcccaacaggtgggcccctgagcgggcgtccgggaccgtggtgtgccaggcgccttccgcccttaacatgcggtggctggcccaggcggtgcaggagctggagcggggcccgagtggggcgccagagccccagcgcgagcaggagaggggccggagcgcggatccgcgccgcgctgctgaagcctggccggccacccagacgctgccggcagcctggccatggcggagccaaggaaagaatctctatacaaacaaatatgtggctatcaaattggagctgatcaagttccggaccccgcagctgcacctgggtaccggttctacaagcagctcagcgccatagagggcgtccctcaggtctactacctactacagcctggaggacctgttcgaccttcacgcccaagacggtgctcctgatcgccatccggctgatcacgcgcatggattatgtgcacaccaagaacctcatttaccaggacgtgaagcccgagaacttcctggtggggcgcccggggaccaagcggcagcacgccatccacatcatcgacctcgggctggccaaggggtacactggtctcaggaccaagaagcacatcccgtgcagccagcacaagagcttgacaggtacggcgtgctacatgagcatcaacatgcacctgggcaaggagcagagccactgcaacaacctggaggtgctgggccacatgttcatgtacttcctgtgcagcagcctcccctggcaggggctcaaggctgacacgatcatgagcggtacagaagatcggggacacatagcgcgccacgcccatcgaagtgctctgcgagaacttcccagaggagatggctacgtacctgcactacgtgcggcgcctggactttgagaagcccgactgtgactacatgcggcgcctggactttgagaagctcgactacgactacctgcggaagctctccagctacctcttcgaccgaagcggcttcgtgttcgactctgagtacgaggggctcgggaagcccttggcgacccccatcagcagtgtccacaccgacctgccctcccagcctcagcttcgggacaaagatcagccgcacagcaaaaaccaggcgctgaactccaccaatggggagctgaacgcggacgaccccatggccggccactccagcgcccatcagggcgcctgcagagatggaggtgggcgatgaaacgaaatgctgctgtttcttccccctgaatcttctccgtgcggccccttggggagcgagcttgtgtgagggccttggggcccacccacagcggcccagggccagacgctggctggaagccaggacacagactgcagggtcttggccggcggccccatccccgggacgaggggtcacttccttcacgtaagactggccaaaatttcttttttttttttttttttttttttgagacggagtctcgctttgtcgcccaggccggactgcggactgcagtggcgcaatctcggctcactgcaagctccgcctcccgggttcccgccattctcctgcctcagcctcccaagtagctgggactacaggcgcccgccaccgcgcccggctaattttttgtatttttagtagagacggggtttcaccttgttagccaggatggtctcgatctcctgacctcatgatccacccgcctcggcctcccaaagtgctgggattacaggcgtgagccaccgcgcccggccaagactggccaaaatttctacacctgtgtctagtcctcccctccaagagcattaactatttaaaacaaggaataaaggaaaaaaaagaaaggccccctccacccccacccctccattactttgctgaagtgagtagtgggatcctggaggcccccagggctgaggcccagccagctgcccccgttagcgtcataaagtccagcttgtctccctcatccaaaggccgttttctcagtgggagggcaggcctggcctggaggggtgctgtggggccatcttgcccaggcccacctgggagggacacaggcattgctgccaggggtgaggctgtgccccaggcctccccaaaactaaaggggaacggaggggtggggccgcggctgaagccagccccgcaaccaaaatgctgcaccaaagctcggtcgccacaggcacggccaccgcagcctttcacagcctggccccggcgaggggcaggtgggccctgctaggagggtgcttctcgaggcacctgttccccgaggctgtgctccgaccctcagaagctgaggggggtgggccggctggcgtcgcgcggctcggcccctgggccctgctgtgtggaggcgcgcgggctcgtggcttcctgtctctgtgctccgccccctggcaagcagccgcagacaaaatgccttaaagcccccgacccagccccgcaggtgtatgtgcaggggggtctgcgggcggccctggactggctggcggactcccagcgggtcagcttgaggcagtgcccagggcggtggccgtgagtctggtttttgctttaccaagtgtacggaaatggcgtttacgtttctctgatgctcttttgaagccatacaacttaggggctttaaaaaaaaaaaggaaaaatgaaaccctccgaaaaaaagatgcccaacatcattggtcattagagaaatacaaatcaaaaccacgatgggataataataggtctacaaggatggcaaaaatcagaaagacaaacaataacaagtgttagagaatttggactaatttggatgcagtatattgctgttgggaatgtaaagtggtgctgctactttggaaaacagtttggccattccttaaaagggtaaacaaagagttaccatatgactcagcaattctacttctagatatatatgcaatagaaatgaaaacatatccacaaaaacttgtacatgactcttcatactagcgttattcacaatagaaaaataatagaaacaaacccaaatgtctgtcaggcgatgaatggatacagaaaaagtggtatattcatacaatgaaatattaatttggcaataaaaggaaatgaagtaatgatacatgctctaatgtggatgaaccttgaaaacattatgctgagtgaaagaaggcagacagaaaggccacatgttctaaaattagattgtgatatttgtacaatgctatgaataaactaaaaacattgaattttacactttaagtgggtggactttatggtatgtgaattatatctcaataaaggtgttactaaaagacaatatagagtgttctttgtttctctgaaggacaagtttttaacttccatttctccaaataagcaattatttgtttttataccaaattagcattttcagattccctactgatgttactggattaagctatgtttttaactttttgttaatttctacattttttgtttcctactattgcttctacattttgtgcactgaaggaggtagtatattgattttacacttacatttcttgtactttctgcctatattagtgttatccacatatccttttgtctcacatttatatttaatactgttagctgtgttttctaagtatgggataatacctttcagtatgctgtaggtgactatatatagatagtacgtttgtatttgaactatttggaagctgaccaaatgtttttattatcttgtagattttactttcctcgttggtattgcagtggcagcaacagagcctatcggcatggaatatctcgaggtgctgaagctcctcttcttgatgactttgtcatgtcttacctctttgctcaggtatgattatattatcttacttgtacatgagttaaatgataaatatcttgctgtttaataagtcacttaatcaggaaaaactttacatatgggaaaattgcagttctgtcttgcacagcaggtgcagagaagtaacaaaattgagtcttttagcactagtttttaatcccatggtttatggataatagaatctattttataaagtttttttggactgatccttttgaatttctttcttttttaggactttagatcattttaaggatttcgcaaagtatagactgaggtttacaacatgattcatgtagacatacgtggctaaaatattagtaacatttctttatggtttttaaaaaaatttttggacaatttcaggcttacacaatggacaatgaactgtagagaaagtaggttacataaaaaaatgagctctgatagtttgtttagctgtttataggaaggtgactggatgttgatacttagtctaagagctatattcaagttatttgttcactaatacagttatgtcaaatttttgtattgtgttggtatttcataatgctttcttctctattaccttgatttaaacagtaattgaaatattttgtcattaaataacttgtttttatgtgctgctagactagtaggaatagaaattaaaggaagaaaatatattagtgctcttgggtaaaaataggcacttggtatccccaaggtatcaggagttctaaatcagatttgctaatattgtaggaaacaagcccacagatcctcatggctcgcatttctgagaggaagcctagtaagcctagttcagtttatgaacaacaaaaggaaaaacatttctctattggggtatgagaccaacaaactttatttttattgtggtaagagatatataataaaaatgaccattttaaccattttaagtgtacagttcagttgtattaagtacaaatacattgctgtacaaccatcaccaccatccatctccagaacatttttcatcttcccaaatggaaacttcatacccattaaataataactctgtatttcccactcccaatggccttttgcaatcaccattctactttctgaatataaatctgccttttctatgtacctcatacaaatggagttatatagcatttgtccttttttgactggcttatttcacttagcataatgtctgtcaggttcatccatgttgtagcatgtgccagaatttctttcctttttaaggctgaataatattccattgcatatgtatactgcattttatttgttcattcatctgttgatggatacttgggttgctgctgtgaacatgggtaaacaaatatttccttgagtccctgttttcagttcttttcaatatatacccagaaatggaatcgctggatcatatggtaaatttataattttttttgaggaactgctacattgttttctgtagtggctgcactatttttcagtcctaccagcagtgcacaagtgttccaatttctcaacatcctcaacaatgctttgctttgtttgataatagccatctctatgggtttgaggtggtatcattgtgattttgatgcatacttctctaacaaccagtgatcatgagcatcttttcatatgcttgttggccatctgtttatcttctttgcagagatgttgcttgttggctatttgtttatcttctttgcagagatgtctactgaagtcctttgcccatttttaaatcaggttgtttgtttgttgttatattatagaaattattattctggatcttaactccttataagatacatgatttgtagatagtttttcccattctctaggttgccttttcattctgttgcttgtcttttgatggacaaaagttttaaatttggctgtattctaatttatctattttttgtttcctatgtttttggtgtcatatccaagaaatcattgccaaatccaatgttatgaacctttctttctgttttcttgtaagagttttatcattttagctcttacatttaggcattgggtccattttgagttaatttttgtctatcgtgaaggtaagggcccaacttcttttgcttgtgaatatccagttttcctagcaccatttgttgaaagactgtcttttctccattgaatggtcttggcacctttgttgaaaatcatttgaccaccaacctacttttttatacagctcctttatctgtatagccattatgaaaagagaggggaatggagagaggcttctaagaatagccttttgaaaacaggatattatgaggttacaactttctgttgcttttacgggtatattatttcacctgtgctgcagagctagtatattttgggggtaggctagttaagtcccatttataagccaagttttcccaaactattcattcagctactttagcctaatattaatactgcaatgtctagtatttttgatctagaaaaattttgggtgatttcagaatactcaattttatccttctaggaaggattgtcttatctagcatggcaaggtaattccaccatataattctaaattatgtctagatagtaccacaagcaattttctattttttaatgtttttacttctctaaatttgtgcccagaaaatatgatagtatttagattactctaagattgtactgttatcattttatattatatgcatgttgtagactatatatagcaaatgtgaccagtggcattaccagagtgtaagaatatcttgacatctttaaataaccaaaaaatagataagccactgaactgtctttaaagttcttaagacagtacctgtaggaagacagatttggaaaaggtaagcaaataaaaatcaaaagtaagatggcccttttaaattcagtttcctctgggaattaattgcctttatatcatcaaatatggctgctaagcaaataaactgctgacatgtgaacaacttttaattaattcatatctattcaacaacaattggatgtttacctcatgttcttggcatcatttctgattttgtgactgtgactgttttttatttccctggctaatgaagatgtaaatttcttaagttcaaattttgtcagctactcaaatgagaaaaggttttctttcttattttatttttttatagagattgaactcctgggctccagtgattgtcttgcttcagcctgtcagcctcctgagtagctaggtacaggtgtgtgccactatgcctggctaatttttttagttttggttttgtggagatggggtctcgctctattgtccaggctggtttcaaacacctggcttcaaatgatcctcctacctcagcctcccaaagtgctgggagtacgagtgtgagccaccacacctggcctgaaatttttcagtagttctaattaaatgaaatttctgagggtacatactataatatttaaggaatagtatttattatgttttggcatttgagactcttccatttgtaacttttctctagtgaatagtttattatgtttttagtattgccatcactcatttttcatatatttattgtcttctgatcatgacttccatagaatttccacatgagcagaatttgttatctaccagttcttttcttttctttctttttttttgagatggagtctcccactgttgcctgggctggagtgcaatggcgtgatctcggctcactgcaacctctgcctcccaggttcaagtgattctcctgactcagcctccctagtagctgggattacaggtgcctgccactacgcccggctaattttttgtatttttagtagagatggggtttcactatgttggccaggctggtctcgaactcctgaccttgtcatctgcctgccttggccttctaaagtgctgggattacaggtgtgagccactgcacccagcccatctactagttctatagggaaccaaggcaggctattaaaaagaatctaccaagtcattgatcatcttctacttaaacagtataacttacttgcctgttctcaaaagtgtggtgaaataagtgtttaaaattgagcaaaaatctgtctcctaccctgaattaattttgtattagcaacgtttaggcctttgttttgggtgatactgattatttgatggtgtggttcttaatagtttattttcttatatgaaaatatcttctatattttattaatagaaaagcaaatatacttttaaatatgtttcttttaataaaattagtttaaaaaggttccagtaaagctttaatttcatgagacaagttattacatcaagagaagagaaatacagatgtagagtatagagggcccttgtccggtttaaaaccttgattcgcattgttattttaggtaatatggctcttacctttttttctacaaagaaaattggtattatgtttagaatatttgtacttctgctttctttttctttctcccattacatgttcagtcagatttatctgtattcctaaatcctccaggtcaaaatcgtagaacctctgtgtttctctcttcttcattctttagacaatatatagttaataaagttatcagccttttttcagaatcttttagtatcttctgtttcctggatcagatccttattatttcgtatctgagccatacaccagcctcttaaagagcctccgtaaatacactttattttcttcaagcacttctatcattgctactactctgccaatggaagagacatgatgaaaacagatctccatagtttctaggatcaggtcattcaagggtacctgcagtcggaccccaacttacttttctaagttttaatccacattatttcttcacataaacttcaggccctaatcaaattagtttatgcatctgaacatatctggtgcttttgtgtgtgtgtcattccttctatttctttaccctgttttgtgtccatcatacatttctttatttttaaacacactgtgaagtttcaaatcttccatgaaaccctccttgattactccagctgaatataatcttaactttctccaagttcctgaaggagcttttgtgtggtgcttcctatatcatgtctggtgttataattatttgcttctgtttcgcttctaagctaaattttggtccccttgatgactgagaccacatcttatacagtcatgtgtcacttacttatggggatatattctgagaaatatgtcgttaggcaattttattgttctgtgaatatcatgtattgtacttatacaaacctatatgttatagcctagtatatgcctagtctgtatggtatagcctattattgctctaggctacaaacttatatagcatgttgctgtactgaatattgtaggcacttgtaacacaacggtaagtatttgtgtagttaaacatatctaaacataaaaaagatacagtaaaaatgcagtattacaatcttatggaaccatcgttatatatgtggtctgccattgaccaaaacattgttatggggcacatggctatttctttgtatccaacaccacttgtagtatgatacttccaacataattggagttcagtatatatttaactcagtaatatctactttaatttaggtaatttttatgtagaagatataatttgaagatatatttaatgaaataggttgatgttatatgtactctgtaattgggaacccagtgtaaatcagtttccatttgcaaatgaacttttattaaaattgtatcgcaaaatgaatgaaaattaaaggaggaatttatgccatttatttatttattaatcattttagagactgggtcttggtctgttacccagactagggtgcagtggtgtgatcatagctgaagagatcctcctacctcagccccccaagtagctgggactgcaggtatgtgccaccatgcctggataatttttaaattttttgtggagatgagatcttgccatgttgcccaggctggtctcaaactcctgggctcaagtgatcttcatgccttggcctcccaaagttctgggattacaggcatgagccactgagcctggccaatttgtatcttgtaaatgcatatgttctgaaaattatgattaaaatataatcatagattaaaacatgataatgaaacttacgatgagatatttccttcaaatttttggttttagtggcggcatgattttgtgcacggatggataaaagtacctgtgactcatgaaacacaggaagaatgtcttgggatggcagtgttagatatgatgagaatagccaaagaaaacgatcaaaccccactggccatctataactctatcaggtaattttcttttgcaaatccttacacataagtgtgagtagagattttatataattcgtatatattttctgtgtttacccatgccttttgattttgtaatactagttaagtactccttatctaaaatgcttggaatcagaaatgcttcagattttggatatttccagattttggaatattggcattgaacttaccagttgagcacccctaatccaaaatgctctaatgagcatttcctttgaacatcatgttgacgttcaaaaagttctggattttggaacatttcgtatttcagatatttgcaagagggatagtcaacctataataaaaaatcatatgggtaagttttatatcttgggagtaaaacacactttgtaaggtgaaattatttaaagagttgtactacaggaaatatcataggtattaaatatctattatttgatttcatttattctgagaaggctagggaagttcagaggaacagaagaaacacctggaggcatactttttgatagaagatcctccagttggctatataaatgacctgaataagtatttcccaaatggtggtgtatattttatttgcattagactcacgtgggggagcctgttaaaatcaaagatttctgggtcctaatccaagagatttggattcagtaaatctgagttgaagcccacaaatatgaatttttacagatgctctagggtattcttatacaaatggtccaaactctgcattcttcaaattattcttctgcatattgaacttgacaatcatggctaatataaaactgctttttaaaaaggtatatataagaatggtttaagtttgaaggcaaatatgtattttatatattacatacttcccagattaaaaatttgagtacatcatgagtgtggttaaagcttccttttttgaaattgttctcccaataactggcttcagtcatttctttgccatgtcatcaaaacagttacatacccaatttgcagagtatcaatttctgtatttctctctttggttttaaatattcttgttttactttcagatgtctgttaggtcttaacctaagggtgtaggccatagggtataattttaggaactcagaaatctagaagattccaaagcccaaaggaaaaaaaaaacacattcattcattcaacagctacttattgaatacttgctgtatgccaggctatagtagaacatagttggaggaagagtatcttagatgtcgttacatagaaactgaaggaattcaggggaacacagttgaagaacagaagctttgacccattgaagatgaatgttataaatatgaagccatctctagacttaagctatcgtggaatatttctgctttggaaaccatgctgtcatccaaagtcttggcacaatctttctatgtagattgtagtttcttccagtttgagaatcatgtcatctattgctcttatccctacattatttagtctagtgtcctaaacctaatgactatttagtaactatttatctgattcttttaactcatgctcttagccaggatataaacacagatgcaaaatgctgcatcatttttttttactgctttactttaaaaatagtgtagatattaaacattcatataagattccatgatattttaaaagagtttattgagataatttacaaatcataaatctcacccatttaaaatatacaatttaatattttgtattatattcacagggttgtataaagatgaccagaatctaattttagaacatttgcatcctttctgaaagaaaccccatgcccattagcattcagtcctcatcccactttcccccagcctctggaaaccacttatctttttgtttgcgtggattttcctgtctcaaacatttcatataaatagaatcatgcaaaatgtggtgtggcattttttttgtctggcttctttcacttaatatgatgtttccaaggttcattcatgttgtagaatgtatcagtacttcatttctttttattgctgaatcatttcattatatagatataccacattttgcttatttgttcttcacttgatgaaaatgtgggctgcttccatgttttggctattgtgactaatgtggctatgaacagttgtatatgagtaattttgtggatgtatttttttcattttttcttgtgcatatatttaggagtggaattcctggaacatatggtaactgtttaactttttgaggaactgcttaacttttcaaaagcagctgtgccacattacattcacactagcagtacatgaagagttccaactctttccgcacttgtttctgtctgtattttatccatcctagtgggtggaagtgctgtctcattctagttttgatgttcatttctctaatgactactgatgtttggcatcttttcatgtactttttggccatttgtatgccttctgtagagaagtgtctatttgaattcattgctcattttttaattgggttatttgtcttttaattattgagtttagaaaattctttttatattctggatacaagtctccacatataatcatatttatgatttgccattatttcctcccattctgtgtattgttattttactttcctgaaggtatcatttgtagcacaaaagttttaattttgaagtagtctaatttgccccatttttctttgtgtcttgtgccatgtggaaatgtggttttagcaacatggatgtctttcttggttttagcaagagcagtttctcttgaaataatggaacagaagccaaactggaatgagttgagggataaatggaaggcaagaaaatggaaatggctatgtacatgctttcaaaaagaggccagataggctgtggccagaaggaaatgtgggattaagagattttacattttatacgggacggacattaatttagcaagtcctttgtgcctgtggattctacatctaatatgccacagaatgaggtccagaaaggcttcctggattagatggtacttgagccttgtcgaatgagtaactagataggagatggatgattggaagaaagattagcatatattacggcatggaaaattatttaatggtacttcagaaataaaatgttccttagaagcacagaaataaattaccttctttagaatattgtacatagagatgaatgtacagaaaagtcagaatatttctaaatggaattgttttgatcacaaaggaattattaggagttgaagctggcctaacaaaataatatacagaagtatgtttgcataatgaaaatggcttccaacaaaatgtaacaatttccaaaattcaggtaaatgttggagcacagcatcataggaaatatttgtagcacagttcaatatatgccaaaatattatcttataaaccattaactctggtatgtgaaatagagaaaaggaatttttagagattcttattaactagactgaggattcatttcattaggggaagaagattaacatcttcttttgtaaacattgatgataacttagagtgtgtggatatatttatatcatcaaacaaaatcttaaagttttatactgtatggatgggggttatgtcaacttacgccacttggccactgtgttgtaaggcctacttaatcatggaaaaaggtggtaacttctttttcaatttttagatttatcttccaatttttgttttgttttgtttttctgtatgtgcttttttatccctagctacaagacattcttaccaaaatgtattcgagcaaagatccaagactatcatattttgacaaggaagcgaataaggtacagatttcgcagatttattcagcaattcagccaatgcaaagccactgccagaaacttgaaacttaagtatcttataaatctggaaactctgcagtctgccttctacacagagaaatttgaagtaaaagaacctggaagtggtccttcaggtgaggagatttttgcaaccattataataactggaaacggtggaattcagtggtcaagagggaaacataaagaaagtgagacactgacagaacaggtaatccttaatgatatgttcttgttctttgttattttaagtacaatggaaataaaaacaaagtaattttaatcatttgcaacatggtattgcacttctcccatttgatagaagtggaagtttttaatagcgtgaacctatcaaggtcatataattctttgcctactattcttaaatggttttttcatttaattttttatgacaaaataattaccaatgactatattatagtttcagaaagatgtcaaattctaaaagtgattttaaaggagttttgcctttcactactagtgataacagaaggcataattataaaacttgttaactagaaaagattgatattaattgattttatgataatatatacctgctaaataatgaatttattttaggtttgcattgcaagttttgaatttgttaatatccgtgttgttcatagattgttactagagatttagagggatcattttttaatttttcatctttggtagtcacatttccagttttctggcagtggtttctactaatgttaattgaattgaagagtgccatagcacattttagattcctggcatcatttaatgccctcatttttaagtcaagcaagatacagcatagtcttagggttagattgatagagtaaatcacgtttaatgcttatctattgttatcaataccttttttattttaaagaatttggaaagaatgttgtcttcttaagtcttgttttaaaatggctctgtaaattctacccgtttttaattttacatgcttttaattataggatttacagttatattgcgattttcctaatattattgatgtcagtattaagcaagcaaaccaagagggttcaaatgaaagccgagttgtaactatccataagcaagatggtaaaaatctggtaagtttgctttatgattgaataatggtttcattttatagttctcagaaatgtgtattttagaatcttagtaccaaaattattttctggtaggaattttgattgtagttttaaatataactctaaacatcagttcagtaaactttttgataacatctagctttttgtattactatcaacaccatcttcctacagagtttcttgtacattactgtactttttttactcatttttatgattagcaaagcaccagttactttctcccccatccctactctagattatactagttctctgatgtaatgctcacccctgactaaaatattttatcaacagggatgtatatgtgccagttatactgcctaattaaaggagaaaaaataaatcaatgatgtctggaatttatataacaaaatgtaaatcaatcccaggtcagccccacccaagctgtaggacatggttgattctaaaagattaacgctttctctttttttaaatagcttcagaaatctaatttattttaatgtaaataggagaaatgaattattttatactttgctcttaagtttctcatttatcttctctgtcttctttttaactcagatgcttcttgacccttcctggcttaaactagtcctattaatgttatttgtctatttatcttaagtatttatatggcttacctgtctggctgttccagggttatattaccaaaattgtaactaacttgcaactcacttaattcagcatagttttctgttcttagataaaaatatgatagtacacctactgcctagtagactgtgagccttttgaaggtaaggatcatatttttatgtgtgtttgtaccccctacaccttgcacagtactcagggcctagtttagaaaaagcttgataaatattttatggatgcataaaaggatgattaacaattatcaacctcaatgtggatatataataaatgtttctgggagagtttattgatcttaatgtgaacaaactgtagtaacccaaagaacttctccatgggactgtatttggacttggcttaattttaagtctgcaatacagagaagttaagtaactttccaagggcacagtgttagttaagtggtagggctatttaaactcaaatgcatgctttgaaaacctaagctcttaagtgtgacactaacttctttgctaagtatccgtaaagctccttaaaaatattatactgacattttgttggaattgtgcaacaaactgggaagagttgacatttctttctcatattaaattttttattttagggatacattgtatttctccttgtatacaagtattattttatgtttttcagtaattcttgatcattttattcatattgatacatcatgtttcttgctgaattttattcatgatatgttatgctttttctgttgtttattaaaattaatacttcttctctgtgtattttcctaccaaattatttatggatataggaaagtaatttttgcttattattgcattttcccagtgtattatgtgttagtaacattttgtttttactgtcattttcctcttcattctggcatttatttctctttataattttggtaaaatatatataaaataaaatttagcatcttaaccatttttaagtgtacagtttagtagtgttaagtatattcacttttgcatccaatttccagaactcttttatcttgcaaaattgaagtctacacccattaaataaaaactcaccatttccccctcttcccaatccttgcaaccagcattctactttctttttttttttttttttttttgagatgagtcttgccctgtcatccaggctggagcacaatggcgcgatcttggctcactgtaacctgtgcctcctgggttcaagcaattttcctgcctcagcctcccgatagctgggattacaggtgcacgccaccatgcttggctaattttttgtatctttagtagagacggggtttcaccatgttggccaggttggtcttgaagtcctgacctcatgatccgcctgcctcatcctcccaaagtgctgggattacaggtgtgagccactgtgcccagcccctctactttcttattctatgaatttgactactctagatacctcataaaagcaggctgaaacaatactgtctttttgtgacaggcttatttcagttagtataatatactcaaggttcatttgtattacagcatgtatcaatttccttcatttttaatatatgtatgtattctgtgtcatgtatataccacatttgttcattcatccatcaatgaatattcaggtcacttttttactttttgacaattgtgagtaatgctgctgtgaacatgggtgtacaaatatctcttgaaaactctgctttcaattcctttggatatataccttctattagtccgttctcacactgctataaagatactacctgggactggataatttatttaaaaagagggtttaattgactcgcagttcggcatggctggcccaggaaacttaaaatcatggcagaaggtgaagggcaaggaagccatgtcttacatggcagcagaagagagacagtgtccaggggaaagtgccacttttaaaccatcagatctcatgagaactccctcactatcatgagaacagcatgggggaaacaacccccatgattcagtcacctcccaccatgtccctccctcgacacatggggattacaattaaagatgagagttgggtggggacgcagagccaaaccatgtcatacctagaagtagaattgctggatcatatggtaattctacttgtaattttttagggagccaccatgctgttttccatagcagcggcaccattttacattcctaccaggagtacattctccacatgctcatcaaaacttgttattttctgttttctgatagtagccatctgatgggtgtgaagtagtatctcattgtgattttgattcacatttccctaatgattagtgttgctgagcgtcttttcatatatgtattgccatttgtatatcttctttgaagaaatatatattcaagtcctttgctcattttttaatcaggttttttttgctgaattatagaaattatttatgtattctggatattaatcccttttcaaatatatgatttgcaaatattttctcccattccatagattgcttttcactatgttgcttgtgtcctttgatgcgcagatgttttaaagttttagctagttcaacttttgttgcctatttttctttttactttgttgagatataacatgaacccagtaaagcacactaatcttacgtgtatagctcaatgaatttttacatatttgtacatctttgtagccacacccacctcaaaaaacagaatagttctcttactcctagaaggtttccacatgcatcttcccacatattcacctccacccctaacttaagatacctatcatctaccatcacttagttttatctattaataaaggttgtataaatggaatgatactgtatgtattcttttaaaatctagattcttttagttagtataatgtttggagattcatttatgttgttacatgtgtcagttcattcctttttattgctgggtagtattgaattgtttgactgtacctcaaattttaaatgtattctgttgatggacatttgggttgctttcactttggggattttagggataaatttaccatgaacattcttatacatattttttggtggacttatgcactctttttttgtatatatatatcctagagataggattattgagtcatagtgatagctttagtatactgccaaacaattttttgtagttctatcagttcactcttctttcagtaatgcatgaaaattacagttgtctcatatccccatcaactcttaattttgtcagtctaaaaatgtcttagtttgtctggtggatgtgtactggtagctattgtagtttttattttcattgccctggtgagtaatgatgttcaatactttttcacttacttattgttcatctgaatatccttcttatgaagtgcctgtgacagtcttttgcacatttttcattgacttgtccctttctgatcaatctgtagagtctctatagattctaagtcttttgtaggatgtttgtaaaacgtatatagacatacgtcagagatatttctagttcagttctggaccactgcaataaagcaaattttgcaatgaagtgagtcacataaattttttggtttctcagtacatataaaagttatgtttacactataatcaagtctactaagtgtgcaacagcattatgtcttaaaaattaatttaaaacactttattgctaaaaaatcctaatgataatctgagcctccagagagttataatctttctgcttatgagggtattattttgatgttgatggctgctgaccgatcagtgtggtggctgcttaaggttgggttggccaaagcaatttcttaagataacaatgacatttactgcatcagtagactcttcatttcgttaaagttgtctctgtagcatgtgacattgtttggtaacattttacccacagtagaatttctttagaaatgagtcagtcctctcaaaccctgccactgctttatgtactaaactttattctaaatcctttgctgtcttttcaacaacattcacagcatcttcacccaggactagattccatctcaagaaaccatttttttatgcataagaagcaacttatctgtccaaattttatcatgagattgtagcaattcagtcacatcttcagctctacttctaattctagttctcttgctatttctaccacatcctagtgacttcctccattgaagtcgtgaacccctcaaagtcatccatgagggttggaatcaacttcttccaaattcctgataatgttaacactttgaccttcttccatgaatcactgatgttcttcctggcatcaagaatggtgaatcctttccataagtttttctatttacccagctccatcagatgaatcactatctatggcagcttagccttacaaaatgtatttcttagataataagacttgaaagttgaaattactccttgacccatgggctacagaatggatgttgtgtcaccaggtctgaaaataacatgaatatccttgtacatctctgtcagagcgcttgggtgaccaggtgcgttgtcaatgagagtaatactttgaaagcaatctttttttctgagcagatcttaacaatgggcttaaaatagtcagtaaaccatgctataaacaatagatgtgctgtcatccaagccttgttgttccatttatagagcacaggcagagtagacttagcataattcgcagagccctgggatttttggaatggtaaatgagcgctggtttgaatttcaagtcaccaatggcataggcccttagcaagagggtcagcctatcctttgaagtttgaaggcaagcactgacttctcctctctagctgtggaagtcctagatggcatattcttccaacagaaggctgttttgtttacatttgaaaatctgtttgttagtgtcaccatcttcatcaatggtccttactagatcttctggataacttgctgtagcttccacatcagcatttgctgcttcaccttgcacttatgctgtgcacatggcttcttttcttaaacctcatgaaccaacctctgctagcttccaacttttcttctgcagcttcctcacctctctcagccttcatagaatttaagagcattagggtcttgctctagattaggctttggcttaagggaatgttatggctggtttgatcttctatctagaactttctctgtatcatcaataaggctgttcactttcttataatttatgtgctcacaggagtagcactttcagtttccctcaaggacttttcctttggattcataacttgcctttttagtgcaagaggcctagctttcagcgtgtgttggctttcagcatgccttcctcactaagcttaatcatttctagcttttgatttaaagtgagagatgggtgaatcttcctttcacttgaatactcagtggtcattgtaggattattaattggcctaatttcattattgttgtgtctgagggaatagggaggcctgaggagagggaaaaagaaagggaaatagctattcggtggagcagtcagaacatatacaaatttatcacttaagttcaccatcttatataggcccagtgtgtggtgccccaaaacaattacagttgacccttggacatcacaggtttgaattgtgtgggtccacttatatgcaattttttttcagccaaacatggatggaaaatatagtattcacaggatgcaaaacctgcatatgtgtagggctgacattttgcatatatgggttctgcagggctgatttcagaacttgaatatgttcagattttggtatatgcaggggtcctgtaactaatcccccttgtattctgagggacaactgtacaatagttacatcaaaggtcattgatcacaaatcaccgtaacaggtataatagtaataaagtttaaattttgtgaaaattaccaaaacatgacacataggaagtaagcatatgctattggaaaaattgcactgatagacttgtacttgctccacttaagtttgtcagaaaccttccatttgtaaaaaaaaaaaaaaaaaaaaaaaaaaaaaaagggtcatatctgcaaggagcaataaagggaagtgcagtaaaacaaaatgtgtctgtatatcaataagagggatactagttagtgaactgctagttcaaagggtatgaatatttacaactttgatagattattaaaatacttctcaaaaggtgtttccaatgtatctgtacacctgttttcttgtatcctttgccaacactggatgttatcaatcttttaatttttctgccaaatcaatgggcaaaataatgctgtcctgttatatttcatttccttaattagaacctgagattgagcaatacctcatgtgtttataggtcagctttaatatttatacttctgtggattgccttttcatgtcctttgactagttttctttttttatttttaattgttttatacgttttattcccacaatgtatgttaggtatattcctttgttatacatgtttgtaatctccaagtcttttaattttgtttaggataccttttatagtacttgtttttttggctatttgtgttagctaaataccttttatagttcaaacatgtcacatgcttgtctctttattataatttttggttgaggactctattctgtgttctctttatgattatgtaaatattgttcattgctgggccaagaaatatgctgtaatcacattttcgttcttatataactttttccaggagttaattattgctttatgatttttcctttgtatctagctttattttcattttctacaagaactctgtaaagtagtggacttctcaatacaaaatttcacataatcaaacctgtcatatatgatagcatttttacttcttttctggagaagtacctcttcgatcacagcatcttactttgtagtgtggactggaagttttctgggtacagctattattttgtcagctgtaatttttggtcattcctttcttatcctggtaactatgttttcatctctcttatattggatctgattttctaaatctcatgtttgccctgtttttctaggtacagcctctggtatttgttggtatctttaatgtgattgagacaaattagaaaattaatttagagaggatttttacatttttatgatattgaattttcctaccatggttaatcttctatatatttaaataaaaagttgcataagagtgttttgaagtttttgttaattattgatattgcatcctctttgttacaaatggggcttttttcattatataactgactttttgtatgtaaaaatataatacgtctatatattttcccatgtaagtaacatgctgcatttttggctgactacatgttcacatatgtattaagatacaatcaggccgggcatggtgactcacgcgtgtaatcccagcactttgggaggccaaggcgggcggatcattaggtcaggaatttgagaccagcctggccaacatgttgaaactctgtctctactaaaaatacaaaaattagccgggcgtcttggcgtgtgcctgtaatcccagctttttgggagactgagacaggagaatcgcttgaacccaggaggcagaagttgcagtgagccaagatcgcgccattgcactccagcctgggcgacagagcaagactctgactgggcgggggccacaaaaaaatcatagcatagctacatatcctaacattttagtttgtagcatgaatactttagcagtatgtaattggtatgtagggctgatgccgtggctcacgcctgtaaccccaacactttgggagactgaggtgggtggatcacttgaggtcaggagttggagaccagcctggccaacatggcgagaacctgtctttactaaaaatacaaaaattagctgggcatggcggcatatgcctgtaatcccagctactcatgagggtgaggtgggtggatcgcttgagcctgggaggtggaggttgcagtgagccaagattgtgccagtgcacttcagcctgggcgatggagcaagactctcaaaaaaaaaaaaaaagaaaaaaggaaatgctcatgatttctaatgtcaacttttatatcatattaaatagatttctagctgagataactggtatattagtctaagaaggacattggaaaataaagtaaaatgatggctatagagtgaactataactgggaaggtatgataatctgtatttaggaggatcttaaatatcagacatgagaatttgtaattcatattgagtactgagccataaaagatatgagcaatttagaagaaaattgtatttaacatggaatgaagaaaattttcaatatttaacatggagttgactttctaaaaggtgctatttctttttcttttctctgcttaggaaattgaacttagctcattaagggaagctttgtctttcgtgtcattaattgatggatattatagattaactgcagatgcacatcattacctctgtaaagaagtagcacctccagccgtgcttgaaaatatacaaagcaactgtcatggcccaatttcgtgagtaatacagacttaaaagtaaatttttagaaaagtaaatgctgtatttacaaagaagatttaacagagtgatacatgtatgtttagaaaaaaataatttgacaagttttttttaaacaaaaggctatttgcaatcagattacataataattagaattatttagtgtataatttaccatctgtatcccaatctataatatttataagttgtacaagtttaacatttgttaatcatgcctatgtgtgattcactcctgcatgttactaaaaaagaaagatctccaatttatgttttattaattttaaaatactgcaaggaagccacagtgcaaaatttgaaaattctttatgtttggatagtccatctccttctactgaaaggttcaaacacaagatatatatgatgtccacatttctagactagtgctatgtagaacttcctgcagcgatgaaaatattctatatctgtgctgtgtaacacagcagccactagctacatgtggctgtttagcatttgagatgtggctaatgcaaccgaggaactgaattttaatttaattttaatttctttacatttaaatagctacatgtggctagtaactatcacattggctcacacagttgtagatccttactttaatactgggtaaagctagctatcatgcataacatctatttagcttaagtcctaatgatctcttagctaggatgtggtttatgttgacaacagatttgaataactcgagcaaagggaaaatctgggatcatgagcatattatgttctttgcatttaacctacccctaaatatttgagaaaatacatcttgggtaatataaagagttgatttagtctatgcttaatatttatttagtaatgaatattgttgctatgaaaaagttgtactacttgaactttatgtctgtaatttacatgtttaatatttttaaaactccttgcctttattcatgtatccataaattcattcaaacattcttttatttatatttactgagtaactactatgtgcaagcattggtttgtatattagaaatatggtgataagtgaaacagaatgattctttcttttgtatagattatattttgcttttctttcagggtgtgcagcttcagaaaacataaaaaattttaaaaaccagtagtctttgtcagttgccatggttcttctcttagactttgttatcgtactgaataataaaatcatgcattcagatttttatgtcagtaactgctatggtagtagagatataagtattttctgatatataatctttatagttaaatgaaggtttctgagagtatggttttaaaaatattaactttgtaatcagcaggcagaaaaatcaaatgaacaaattgttctttgtgattttgtcttataaataccttttattggtttttaaagctatataattgtcccttgaagtggtttgaacttactgcaaaatagcttggtactttgattttttcctttgaaagattattgctaaacatataaagtagaggagacaattctgacagttttagatttgacttttgattgttttagatgacacttggtcataatattatggtgcttgatatattattcaaattgcttcttctttacctttaggatggattttgccattagtaaactgaagaaagcaggtaatcagactggactgtatgtacttcgatgcagtcctaaggactttaataaatattttttgacttttgctgtcgaggttagtatgtcacacttattagtggtaacactttatttagttcatttaatttcctctccatatttatttaccatatttcctttttaatactgagaattatagctttggatatgataactagtataatgcttaatttcctcagagattctgtacaaataaacaagttataattcccagggtttatataaaaatataaaataatttataatgtctatctttttattttgcatttattttattttctgatgttttggtgttaccagtgtgttaaaaggtatttcatcaagtgtcttgatgtttctttgtttgcaaaactggaaatctttgccacatcatgtagaacaaaataaatcggaagcaaattttctgtttattaacagtggttgcagaattagaggaaacagaattagagaaaactaggtcaataacaaacaaatagaaacattaaagcacttttaactgatgattttctaatatttttaagaatagtggtctacaatgcatgtttcaacggtaaaactgcaatgaaaccccactgttaatacagatcattttggatctcatctatgattatatactatcacttatgaggcaatttcatggtataaatcctaagaaactatagaagcttgcaaatttatcttgcttttttaaaacagagaaaaataagaactttgttattcaattattttaatttttataaaatgcaacttatatttggcatatgtagagggtagattacttacagaagggaggttatgccatcactttacctttgtgtaaaactggtaatctatcctaatttcaaagtatcctgttactataacagataatagtacattatattcaagtatgaattcaaaaaaatatatatatatattttatgttcactgtatgtgccaagcctaatatgagagctatgtattatagagtttatgctacagccctaccttcaggaaacttatctactggacaaacaaaaattttcaaatatacaaaaaattctaaatcgaacattgtaattatctagcataggcaaatatagacagtaacagacaggtttacaattattaagaaagggcagccaggtgtggtggctcacacctgtaataccagcactttaggaggccaaggcgggtggatcacgaggtcaagagattgagaccatcctggccaatgtggtgaaatggtgaaaccctgtctctaccaaaattacaaaaattagctgggcatggtggtgcgcacctgtagtcccagctactcgggaggctgaggtaggagaagcgcttgaacccgggaggtggaggttgcagtgagtcaagattgtgccactgcactccagcctggcgacagagcgagacacggtctcaaaaaaaaacaacaacaaaaaaaaaaaaaaacaagaaaggttatttggcataggaagaacctgattgaccttgaggtattggtagattttatataaatgtttctgagtagaatgaatatgtttataaaatgcaccttaaaaataggtgaacaagttcataatatagtgcataagacaaatatttaaaaactgcaaaatattaaaaatgtaatattaaagataattatacaaatacaatggtggtgcagtggaatggctgtatgttcacctttgcttgtgcaaagaggtgagcattagagaggacctcttagaaacagtggtacttgaactgagttttgatgaatgaataaaggttcattgctcagaagaagtgggtatacattcttaggtagaaagatagcatgaagaattatcaaggcatgaagcagcatggcatttgcttgaaatgatttaagtcatttaatatggctggaacgtaggttgtatgttggcagtggcaggagctgagattggagatggaggcagaaaccagctcatggaaggctctatatgctacatttgttttaggctttatcttataaatgatggaaaactattaaggatggtattgttgctattaattatcattgccttcttacatgctttttcataaaatcaacttttaaaccacttttgtaggctgagaaattgtaaattgcccttttgaggaactaagtacttctatcactatactggcactacatcggattcatggttcaaatgtttattctgttgcttgttcttgtgatatcattttgtcagaataatcactgtgatgtccattgtgactatccctccctttctttataattaaacttatacagcgagaaaatgtcattgaatataaacactgtttgattacaaaaaatgagaatgaagagtacaacctcagtgggacaaagaagaacttcagcagtcttaaagatcttttgaattgttaccagatggaaactgttcgctcagacaatataattttccagtttactaaatgctgtcccccaaagccaaaaggtaagataattttctagttatttttaaattactggtcatggattgtttatgtggcgtgaagtatcttcagtacattgatttcaaaggatatatgaaagaagcagctctaaaagttaattttatcttattctattgtacaagcatcatcaaataagattgtttactttggttttggtggtctagaagtgacttgaagttcaattattctaaaatgagattttaaacataatgtgtggtatgatgtcatttattgaactggaagatctcactactaaattcttatgttgttttaagtaaaaattttcatatacttcgaggattttaatttctgtattttaaaaataaagacagtaaagttggaaattccttgaaataatgagccttactattaaaaattattaaaattcctgaaaaattgtatgagttaaggaagttactataattttgaattaatgaaataactggcaggaatacatcaaaatccaaattacattagttaaggaagtgattataattttgaatgtatgaagtaactaagaagaaatatcaaagttcaatgagttgacccctaaaataattttctattataaaaaaagaacaattaggagttattaagcatttcttatacgtagaacacatttcattttactcctctttggagcaattcatactttcagtgtattttgaagtgatatatatgtattttattttttcagataaatcaaaccttctagtcttcagaacgaatggtgtttctgatgtaccaacctcaccaacattacagaggcctactcatatgaaccaaatggtgtttcacaaaatcagaaatgaagatttgatatttgtaagtcattagatactcattactgtcttttttgtccttttaaaacaacatctgttttcttgatttacattcatgtgacattggaattattttgttatatacaaatttagttgtgatttaaatatttttcttatgaaaaatatgccaaccttgtgttagatgttagcaaaattaattatcttaattatcctaagaatggaatcttaattttctttttggaaatttaaaaatgattcttcacaaatctcaaattaaaaattaaaaatctacaaagacctatatcgcaactcccaagttctcaagaaagtaagggaaattcaaggggttaaaaataaagaagaaactgagaaaaaaatccagccatctctcagtgtccatgagggattggttccaggactacccatggataccaaaatctgaggatacttaagtggaacctgtggatatgaaaagttggccctctatatacatgggttttgcatcctatgaacactgtatttctttttttaaataactaattattttttaaaattatttatttatttattagagcaggacttgctgtgtcacccaggctggaatgcagaaatactatattttccaactgagtttccttgcagatgcagaacccgccctgccagtacagagggcccactggatttattgaaaaaaacccacatataaatggacctgtgcagtccaaacccatgctgttcaagggtcaactgtagtacataagatctgataatctggcagtcaggtggtgagggttgatgatcagccacatttatcaagggggttaagatttaagagcaatttaaaagggccaggtctcagacctgtgcaaggccacgagttaaaagtgagactatccctgagtaaaaccaggacacttaagtaaatacatcctcagtaaaacaatatatagaatgtgaaaaattcacccactagcaagcagagaagaaaaggaatattgtcatttttaactgcgcttctggtgaggaaaaggagtctctcctaagaatttgtcatcataagctttggaatttgggcttcattatactacctacatagactgagaaatcctaaattaaaagtggtactctcctaatattgtgtggtgcttggaagaaacaaaaaaatcttttcggaaccacatactcttaacctaggcaacccataattcccacagataaaagcattgcaaacacaagcttttaatagaaaatttagaaacatacaaggaaataatgcaggattaattaagagtcagtagaccaacaaacatcaaaattagaactccaggaacttcctatcacagaattttcagatacagactataaaatacatatacatgtttaaagatagaaaaggaattgaaaccacggagaaataacaagacattgttttaacaaacaaaaaagatgtcaggaaaaaggcatagaaatgataaatatcctcattgacattaaaacagaatatacaggatgaaaagtaaattacttatagctgaagagagatgtagtgaacctcaagacagatctgaagaaattaagaatgcagcagttagggagaaagaaatggattatatgaaagagggattaagtggcatggaaggcaaaatgagaaagacccaactcatatctgagctctataaggagacaatagatagaattagccagaatggtaaagacaagcatcttcatgtgagtaacaggaaacagagtggccaggtaacttgactaacattacaaatctaataaatagtagaccttggatttga

SEQ ID NO: 179 - DNA, 5097 bp, Homo sapiens
ctgcaggaaggagagaggaagaggagcagaagggggcagcagcggacgccgctaacggcctccctcggcgctgacaggctgggccggcgcccggctcgcttgggtgttcgcgtcgccacttcggcttctcggccggtcgggcccctcggcccgggcttgcggcgcgcgtcggggctgagggctgctgcggcgcagggagaggcctggtcctcgctgccgagggatgtgagtgggagctgagcccacactggagggcccccgagggcccagcctggaggtcgttcagagccgtgcccgccccggggcttcgcagaccttgacccgccgggtaggagccgcccctgcgggctcgagggcgcgctctggtcgcccgatctgtgtagccggtttcagaagcaggcaacaggaacaagatgtgaactgtttctcttctgcagaaaaagaggctcttcctcctcctcccgcgacggcaaatgttctgaaaaagactctgcatgggaatggcctgccttacgatgacagaaatggagggaacatccacctcttctatatatcagaatggtgatatttctggaaatgccaattctatgaagcaaatagatccagttcttcaggtgtatctttaccattcccttgggaaatctgaggcagattatctgacctttccatctggggagtatgttgcagaagaaatctgtattgctgcttctaaagcttgtggtatcacacctgtgtatcataatatgtttgctttaatgagtgaaacagaaaggatctggtatccacccaaccatgtcttccatatagatgagtcaaccaggcataatgtactctacagaataagattttactttcctcgttggtattgcagtggcagcaacagagcctatcggcatggaatatctcgaggtgctgaagctcctcttcttgatgactttgtcatgtcttacctctttgctcagtggcggcatgattttgtgcacggatggataaaagtacctgtgactcatgaaacacaggaagaatgtcttgggatggcagtgttagatatgatgagaatagccaaagaaaacgatcaaaccccactggccatctataactctatcagctacaagacattcttaccaaaatgtattcgagcaaagatccaagactatcatattttgacaaggaagcgaataaggtacagatttcgcagatttattcagcaattcagccaatgcaaagccactgccagaaacttgaaacttaagtatcttataaatctggaaactctgcagtctgccttctacacagagaaatttgaagtaaaagaacctggaagtggtccttcaggtgaggagatttttgcaaccattataataactggaaacggtggaattcagtggtcaagagggaaacataaagaaagtgagacactgacagaacaggatttacagttatattgcgattttcctaatattattgatgtcagtattaagcaagcaaaccaagagggttcaaatgaaagccgagttgtaactatccataagcaagatggtaaaaatctggaaattgaacttagctcattaagggaagctttgtctttcgtgtcattaattgatggatattatagattaactgcagatgcacatcattacctctgtaaagaagtagcacctccagccgtgcttgaaaatatacaaagcaactgtcatggcccaatttcgatggattttgccattagtaaactgaagaaagcaggtaatcagactggactgtatgtacttcgatgcagtcctaaggactttaataaatattttttgacttttgctgtcgagcgagaaaatgtcattgaatataaacactgtttgattacaaaaaatgagaatgaagagtacaacctcagtgggacaaagaagaacttcagcagtcttaaagatcttttgaattgttaccagatggaaactgttcgctcagacaatataattttccagtttactaaatgctgtcccccaaagccaaaagataaatcaaaccttctagtcttcagaacgaatggtgtttctgatgtaccaacctcaccaacattacagaggcctactcatatgaaccaaatggtgtttcacaaaatcagaaatgaagatttgatatttaatgaaagccttggccaaggcacttttacaaagatttttaaaggcgtacgaagagaagtaggagactacggtcaactgcatgaaacagaagttcttttaaaagttctggataaagcacacagaaactattcagagtctttctttgaagcagcaagtatgatgagcaagctttctcacaagcatttggttttaaattatggagtatgtgtctgtggagacgagaatattctggttcaggagtttgtaaaatttggatcactagatacatatctgaaaaagaataaaaattgtataaatatattatggaaacttgaagttgctaaacagttggcatgggccatgcattttctagaagaaaacacccttattcatgggaatgtatgtgccaaaaatattctgcttatcagagaagaagacaggaagacaggaaatcctcctttcatcaaacttagtgatcctggcattagtattacagttttgccaaaggacattcttcaggagagaataccatgggtaccacctgaatgcattgaaaatcctaaaaatttaaatttggcaacagacaaatggagttttggtaccactttgtgggaaatctgcagtggaggagataaacctctaagtgctctggattctcaaagaaagctacaattttatgaagataggcatcagcttcctgcaccaaagtgggcagaattagcaaaccttataaataattgtatggattatgaaccagatttcaggccttctttcagagccatcatacgagatcttaacagtttgtttactccagattatgaactattaacagaaaatgacatgttaccaaatatgaggataggtgccctagggttttctggtgcctttgaagaccgggatcctacacagtttgaagagagacatttgaaatttctacagcaacttggcaagggtaattttgggagtgtggagatgtgccggtatgaccctctacaggacaacactggggaggtggtcgctgtaaaaaagcttcagcatagtactgaagagcacctaagagactttgaaagggaaattgaaatcctgaaatccctacagcatgacaacattgtaaagtacaagggagtgtgctacagtgctggtcggcgtaatctaaaattaattatggaatatttaccatatggaagtttacgagactatcttcaaaaacataaagaacggatagatcacataaaacttctgcagtacacatctcagatatgcaagggtatggagtatcttggtacaaaaaggtatatccacagggatctggcaacgagaaatatattggtggagaacgagaacagagttaaaattggagattttgggttaaccaaagtcttgccacaagacaaagaatactataaagtaaaagaacctggtgaaagtcccatattctggtatgctccagaatcactgacagagagcaagttttctgtggcctcagatgtttggagctttggagtggttctgtatgaacttttcacatacattgagaagagtaaaagtccaccagcggaatttatgcgtatgattggcaatgacaaacaaggacagatgatcgtgttccatttgatagaacttttgaagaataatggaagattaccaagaccagatggatgcccagatgagatctatatgatcatgacagaatgctggaacaataatgtaaatcaacgcccctcctttagggatctagctcttcgagtggatcaaataagggataacatggctggatgaaagaaatgaccttcattctgagaccaaagtagatttacagaacaaagttttatatttcacattgctgtggactattattacatatatcattattatataaatcatgatgctagccagcaaagatgtgaaaatatctgctcaaaactttcaaagtttagtaagtttttcttcatgaggccaccagtaaaagacattaatgagaattccttagcaaggattttgtaagaagtttcttaaacattgtctgttaacatcactcttgtctggcaaaagaaaaaaaatagactttttcaactcagctttttgagacctgaaaaaattattatgtaaattttgcaatgttaaagatgcacagaatatgtatgtatagtttttaccacagtggatgtataataccttggcatcttgtgtgatgttttacacacatgagggctggtgttcattaatactgttttctaatttttccatagttaatctataattaattacttcactatacaaacaaattaagatgttcagataattgaataagtacctttgtgtccttgttcatttatatcgctggccagcattataagcaggtgtatacttttagcttgtagttccatgtactgtaaatatttttcacataaagggaacaaatgtctagttttatttgtataggaaatttccctgaccctaaataatacattttgaaatgaaacaagcttacaaagatataatctattttattatggtttcccttgtatctatttgtggtgaatgtgttttttaaatggaactatctccaaatttttctaagactactatgaacagttttcttttaaaattttgagattaagaatgccaggaatattgtcatcctttgagctgctgactgccaataacattcttcgatctctgggatttatgctcatgaactaaatttaagcttaagccataaaatagattagattgttttttaaaaatggatagctcattaagaagtgcagcaggttaagaattttttcctaaagactgtatatttgaggggtttcagaattttgcattgcagtcatagaagagatttatttcctttttagaggggaaatgaggtaaataagtaaaaaagtatgcttgttaattttattcaagaatgccagtagaaaattcataacgtgtatctttaagaaaaatgagcatacatcttaaatcttttcaatta

SEQ ID NO: 180 - DNA, 3399 bp, Homo sapiens
atgggaatggcctgccttacgatgacagaaatggagggaacatccacctcttctatatatcagaatggtgatatttctggaaatgccaattctatgaagcaaatagatccagttcttcaggtgtatctttaccattcccttgggaaatctgaggcagattatctgacctttccatctggggagtatgttgcagaagaaatctgtattgctgcttctaaagcttgtggtatcacacctgtgtatcataatatgtttgctttaatgagtgaaacagaaaggatctggtatccacccaaccatgtcttccatatagatgagtcaaccaggcataatgtactctacagaataagattttactttcctcgttggtattgcagtggcagcaacagagcctatcggcatggaatatctcgaggtgctgaagctcctcttcttgatgactttgtcatgtcttacctctttgctcagtggcggcatgattttgtgcacggatggataaaagtacctgtgactcatgaaacacaggaagaatgtcttgggatggcagtgttagatatgatgagaatagccaaagaaaacgatcaaaccccactggccatctataactctatcagctacaagacattcttaccaaaatgtattcgagcaaagatccaagactatcatattttgacaaggaagcgaataaggtacagatttcgcagatttattcagcaattcagccaatgcaaagccactgccagaaacttgaaacttaagtatcttataaatctggaaactctgcagtctgccttctacacagagaaatttgaagtaaaagaacctggaagtggtccttcaggtgaggagatttttgcaaccattataataactggaaacggtggaattcagtggtcaagagggaaacataaagaaagtgagacactgacagaacaggatttacagttatattgcgattttcctaatattattgatgtcagtattaagcaagcaaaccaagagggttcaaatgaaagccgagttgtaactatccataagcaagatggtaaaaatctggaaattgaacttagctcattaagggaagctttgtctttcgtgtcattaattgatggatattatagattaactgcagatgcacatcattacctctgtaaagaagtagcacctccagccgtgcttgaaaatatacaaagcaactgtcatggcccaatttcgatggattttgccattagtaaactgaagaaagcaggtaatcagactggactgtatgtacttcgatgcagtcctaaggactttaataaatattttttgacttttgctgtcgagcgagaaaatgtcattgaatataaacactgtttgattacaaaaaatgagaatgaagagtacaacctcagtgggacaaagaagaacttcagcagtcttaaagatcttttgaattgttaccagatggaaactgttcgctcagacaatataattttccagtttactaaatgctgtcccccaaagccaaaagataaatcaaaccttctagtcttcagaacgaatggtgtttctgatgtaccaacctcaccaacattacagaggcctactcatatgaaccaaatggtgtttcacaaaatcagaaatgaagatttgatatttaatgaaagccttggccaaggcacttttacaaagatttttaaaggcgtacgaagagaagtaggagactacggtcaactgcatgaaacagaagttcttttaaaagttctggataaagcacacagaaactattcagagtctttctttgaagcagcaagtatgatgagcaagctttctcacaagcatttggttttaaattatggagtatgtgtctgtggagacgagaatattctggttcaggagtttgtaaaatttggatcactagatacatatctgaaaaagaataaaaattgtataaatatattatggaaacttgaagttgctaaacagttggcatgggccatgcattttctagaagaaaacacccttattcatgggaatgtatgtgccaaaaatattctgcttatcagagaagaagacaggaagacaggaaatcctcctttcatcaaacttagtgatcctggcattagtattacagttttgccaaaggacattcttcaggagagaataccatgggtaccacctgaatgcattgaaaatcctaaaaatttaaatttggcaacagacaaatggagttttggtaccactttgtgggaaatctgcagtggaggagataaacctctaagtgctctggattctcaaagaaagctacaattttatgaagataggcatcagcttcctgcaccaaagtgggcagaattagcaaaccttataaataattgtatggattatgaaccagatttcaggccttctttcagagccatcatacgagatcttaacagtttgtttactccagattatgaactattaacagaaaatgacatgttaccaaatatgaggataggtgccctagggttttctggtgcctttgaagaccgggatcctacacagtttgaagagagacatttgaaatttctacagcaacttggcaagggtaattttgggagtgtggagatgtgccggtatgaccctctacaggacaacactggggaggtggtcgctgtaaaaaagcttcagcatagtactgaagagcacctaagagactttgaaagggaaattgaaatcctgaaatccctacagcatgacaacattgtaaagtacaagggagtgtgctacagtgctggtcggcgtaatctaaaattaattatggaatatttaccatatggaagtttacgagactatcttcaaaaacataaagaacggatagatcacataaaacttctgcagtacacatctcagatatgcaagggtatggagtatcttggtacaaaaaggtatatccacagggatctggcaacgagaaatatattggtggagaacgagaacagagttaaaattggagattttgggttaaccaaagtcttgccacaagacaaagaatactataaagtaaaagaacctggtgaaagtcccatattctggtatgctccagaatcactgacagagagcaagttttctgtggcctcagatgtttggagctttggagtggttctgtatgaacttttcacatacattgagaagagtaaaagtccaccagcggaatttatgcgtatgattggcaatgacaaacaaggacagatgatcgtgttccatttgatagaacttttgaagaataatggaagattaccaagaccagatggatgcccagatgagatctatatgatcatgacagaatgctggaacaataatgtaaatcaacgcccctcctttagggatctagctcttcgagtggatcaaataagggataacatggctggatga

SEQ ID NO: 181 - DNA, 22744 bp, Mus musculus
  misc_feature (1711)..(1743): "n" at positions 1711 through 1743 can be any base.
  misc_feature (5038)..(5057): "n" at positions 5038 through 5057 can be any base.
  misc_feature (20752)..(20771): "n" at positions 20752 through 20771 can be any base.
gcagaggagtgagaaggaagcctggccagtgggtgctgcccctgggagtcaggaggagcaagcaggaactgaaggatttaacaatccagataatgggtacagaagtcaaaacgttagacatgtccactggacattgtggctcgtggacaataatcctaacactggagctgttggaggcaggaggatcaccaagttcaaggttaccatttggggctaacctgaactctatgagattctttctcaaaaaccaaaatagacttgtgtaaacaagtggagactaataggtttttttcggccgaagaagtaagccaattcaagcggaattgagagtatgaaaggaggtttattgggggcggcaggttcaccgatcccaaggaaggaggctagggaagtcgccatgcagacagggtaagagggaggatgtgtacgcaaggagaaagaaatgcagagacagaaaaagagacagaggaggggaacgaggacaaaatgtctggattatataggtaagagcctttgggggaggggaagcccagttctggtatgccagctatatcctgcaagaggtgtgggctaagggatgctcggggaatctggaggccaggtctgctttgatgcgttacatatgcacctctgcagctcgtctgaaacccaacaacaggggcagaggacaaatacaggaagtcgtaaattaaatgcctttgttttcaagttaatggcaaagctaagtaatagctcggcacaagtgttaagcatgcttggatccctaaccgcctgaggcctcccagcaagtgtccagaggtgcctaaccgaggcctctgggatcgggatagcagtgggcggtaaccggctggagaaaaggccagtgagccccaaaacctgttaacagaggctccctcattcagtgggtcacttcgccgagctcccccgcctcacggccagccctttctgcagactgcaagttcacctgccattaccgttgtcgcgcgctcgtctgcttggactgctgcgggccccgagacctgggctgggactctgcactagagcgggatacgaacgtggtgagcgcggggtcgggggagggcgggccgggagggaagccgggactcggcggaggtgtgcagggttaatccctacgccgtgcataatgaacaccccagtgatcaatttcccggcatcagagatgctagtttcgctggcgggtttgtcaggcgaaggcgctccctggctgggagcacgcgcacctctcacaccccgcttccggccctaagggcagcggcggtgcacatgcgcacacgccccggcccgctgggaggcgggacctgagaggcggagccgagtggagatgcctctgcgatgaggtcatccgtcgagctgtagcgtcgtggccccgcccctcgacgtcttcaccccctcacccacctcgacaccagagctaaagtcgggctgtctaggtttcagtcctaacggttgccgcgcggcgctggcctccgcgcaagcgcgacctgacacgctcacacgcacgcacgcacgcacgcgcccgaggcggtggttagaggctctccacgcagtggactagggatcgggcgggtaaggcgatgggcgaggctgaaacaccttccttcgaaatgacctggagcagcacaaccagcagtggctactgcagccaggaggactcggactcggagctcgagcagtacttcacggcgcgtannnnnnnnnnnnnnnnnnnnnnnnnnnnnnnnncccgagtagaagcccagttccagcgcgatggtactgaggacccagggctacccctgcccttgcagtcacagaccggttgagccagggggaatcaactctgaagcttgaagggtggaccacaggcgggcgtttttcacccatgactaaagccagcctcgcaatccaaaccggcgtcttgatttcgcatttgggcgctcccactccctccctgggggaaatgaggaagtggaggaggagtccaccgggaagtgagaagttagtttgggaggggactctggccgtgccgtatgcggtcttggatcagccagcaaagtgcccagccgttgctcgaccaactctttgacaccagctgctggactcgatctttctttcctccatggtggaactgtgcagagggatttggggaattcaggaagagggccttaaaagactattaaaaaaaaaaaagtgtggtaccagggcagctgaacctctttaaaaagtctagatgtgcccaaattatccgactttctgggaatatcatagttgtggccaccaagctcggataacttgttctggagcgggaatccctcggaacagcacagaggccagcgaatcaggaaagtgaggacggagactgaggttagaaaacttagtagcactgaactagaactccttatttgagccaagaaagtggaattgtctgtgatgctgtaggtgagatttgatataaatttcctacaggtggactgctacttgacacctccaaaaccttagtccagactttagactcaatgtggggtgggagtgggggcgggagggtgtctctgggattgtctccataccactcaacctgagtcatcttctattatggagaggtgggggaaaatataagatactggccagttgaaaggcatacaaagagaagaattgtttaaaagcagctgaagtttatagctgacttagctgtagagtgcttagcattatatgtgtgatggatggcctgacttccaaccattaaggaaccaaaaaataagaaagaagaaaaggaagctaagaagtcccaaagagcagagtaaaagcctgagggctggggctgggctgcaggttcaatccccaacccagaccctcctagaattctcctgggaccaggcactgcctagcggtgatcccagctgtgtttgttccaattgcattccaatttagggcctttctgaaaccaacaggaagtaagactcacactgggagttgaggactgactgctcttccagaggtcctgagttcaattcccaggaaccacatggtggctcacaaccatctgtaataggatctgatgccctcttctgatgcatcagaaaacagctacagtgtattcacacatatataagtaaataaatcttaaaaaacaaaaacaaaccaggaagtaagactcaggcagttaggtcaagtgagtcctggctgccctgagcagcagggtgactccaccctcccgcagttcctgaagaaccttgtctctgggctaagtcttcagacagcgagggggaagaacagaagcctccctgcttgctgctggtaggacaggctctgctgggaaattgcctgtacacctctggcagatgagaacctgaattgaagctgccttctgtgtagcttgagtcagagggtaaatggtatgtcccagtgttacttcactatataagatgtggtgtggctggtcccaagaaacccactaaggcatcttacattatagagatcagctttcctctcctgtctactgtagttagactgctgatgcaccagctcccgtgctgcctaccctctcgggggtcatgttctgtgctgccgcacagtgggagagtgggctttcttctccagaacaaactgaccaaactagtgttctgggttcagctctacagtggagatgtgattgagatggggttttaatttttgtatgtggtgggggtggaaatcgaagggccttgtacattctgggaaattactctatcactgagctacattttatcccccaaagtgtttatactttaaacaagatttttcccttacagtccttcatggtttcctggcccctggacatgtgccttcatttatctgtttctgtgatgtcgttaggggccacaaccagtgctgaggtggccccagatagcagaaagccaaacggattctacctgtccttgctctctccatctatagcatgtaaaaccaggagcaatgatggcttcaggatgtatgggtttggtgacaggaccaaaatcaagttccaagccagaaggaccatccccatccccaccccacccaccaaagagccttggccttttcaagggccctgtatctatgctggcctgtctttcaggatgaggctgtagagcgggagacacccgatctttctcaagctgagactgagcagaaaatcaaggactacaatggccagatcaacagcaacctcttcatgagcctggtgagttggctgttcaggaatgtgggagaacagaagcccagctctgggccagatgtccagagagtcagagcaaagtattctggggtgtacccaagcagctatctgtgcagacctggctttaccctgcccctggacgactcaacctaactcttccatctccagtagaacttcctgacatggcatggttctccttttcctttctttcttttcagaataaggatggctcctacacaggcttcatcaaggttcagctgaaactagtgcgtcctgtttcagtgccttccagcaagaaaccaccttccttacaggatgcccggagaggtacggggcggagcacagccgtgaagcgccgcacctctttttacttgcctaaggatgctattaagcatctgcatgttctatcacgaacacgggcacgtgaggtcattgaggccctgcttcgaaaattcatggtcgtagatgatcctcgcaagtttgcactctttgagcgaactgaacggcatggccaaggtaggtttccagtctcagcactccctgtgtaagggttatagatcacatacctgtgtattaaggggctgaggcatctgagtctgtctttgtttattttcccccgcccaacctccagtatacctccggaagctgtcggatgacgagcagcccttgaagctgcggcttcttgcagggcccagtgaaaaagccctgagctttgtcctgaaggaaaatgactcgggagaggtgaacgtgagtccgtagtccttcttacttactttcttactttcttatcactaacaaagctagtgggggtgtagccatggtgaggatttcagggagaaaccgggnnnnnnnnnnnnnnnnnnnncacagcctgtccaagaatacacaggtcctctaatggaagtttaggcttccaggactctttgttttgttttgttttttgaaacagggtttctctgtatagccctggctgttctggaactcactttgtagaccagaatggcctcgaactcagaaatcctgcctgcctttgcctcccaagtgctaggattaaaggcgtgcgctacctctgccaaacagcttctgggactcttaagccaaggtctagagcctatcccaagaaactataggaagaagctgaatctagtggttcatgttataatcactgtactggggaggctgaaactggaggattgttacgagtttgagatcagtctggactaccaaaacaaacaaacaaaaacaaaaaacacacaagctaggaagaattgtcttcaggctttgttgtttcctggtgttgaaaatgagaacttgactaactcatagtgagccaagaccagttcagagctccatatatatgggctcagagatggctccacagtgcagaggatccacattctgtttgaagcactcatatcaagtggctcccactcacctgcaactccagcgccaaaggatttgtcttcctctgctggcatcagagggtgcctggagttatgtgcctgtgaccccacgcgcatgcgcaagcacacaactaggacaataggaaagatggctcagtggttaaaaacatgtattgttcatgcagaggacctggatttggttcttagacgcatgtaaaagcttacagttgcccataattgcagaccatacacacaatgtgcatacctgcgtgcaagcaacacacttatacacataaaacagattttttttaaagactttgtgtatgaatgttttgcctgcatgtatatatgtgtacacgtgcccacagaagtaagaagaaggtgttggctctcctagaacagagttacagatgatggaacccaccatgttggtctaggaattgaactctggtcctcttcaagagcaaccaatgctcttaaccactgaactatctttcgagcccctgaaacaaaccttaaaacaaaaagaaaaagaaaagagctttgcaggtataacctgaaaaacataaaggcctcttggaagcattgagacggtctgccagctaggacagatggcacaggcctataatctcatctacttgggaagctaaagcaggaggattgcctcaagttcaagactaggctggcctgtatagcaagatcctatctcacaaacaaacaaaccactcttcctagcaaggcctagggacagtggcttatactctcaactacttggaatgctaaagtgggaggatcactagttcaaagccttcctgggctacagagtgacttaaagggcaatctacgctaacttaatgagatcctgtctcaaaagtaaaaaggcttgggactgtagttcagtggtaaagtgttgagcaagcttagccctttgttcatgtcttagttaggtcttctattgctttgatgaaacactatgaccaaaaccaagttggtggggaaaaggtttatttatttggattacagttccatatgataatccatcattgaaggaagtcagggcaggaactcaaacaggacaggaacctgaaggcaggagctgaagtggaagccatggtgggcgctgcttactggcttgctcagcctgctttcttatagaactcatgaccaccagcccaggggtggcaccatacacaatgggctaggccctcccctatcagtcactcattaagaaaatgccttaaagctatagcttgtggaggcattgttttcaattaatagagaattaatattccctattttcagataactttaacttgtgtcaagttagccgaaaactagatagcacagtgcaatttccagtaatgtaaaaagaaagaaaaaaaaggacaatgactttttacatcggggttagttgtggcttagtggtaagaatagacgctcagcatgcacagagctcggcagcaaaaaaaagaaaagaaaaagaatagggtgggtacaagggctgtatgggaatgtagcttggtaaaaggtaatttgctaacatttatgagaccctaggtttgaatcagagcccattatattgagggagagaatatgagactatgcgggagaatacacctaacaacagatagagatatttcactacaaggagactgttttgtaggatctgttttctatacagactgctcatgaggatcctagcacagaccatttagtgaaaagcctaacaccaaggctagcattgtgataaatacttgtaatctcagcgttccggaagcagaagcaggagaatcacaagtttgagactagcctgggctacatagcaagttaaaggccaacctttgatatgtagaaagactatgactcaaaaaaacaacaaaaaaaaataggggacttaaagagttggcttagcagggctggagagatgggtcaacgattaagagtaccggctgctcttctgaaggacccgggttcaatacctggggttcagttcccaatacccacatggcagctcacaactgtctgtaattccagttccaggggatctgatgccctcacagtcttacatgcaggcagaataccaatgcacataaataaattataaaaccattaaacaacaacaaaaggagttggcttagtggttaagagtacatgttgttcttacagaggacatgggtttgatgcctagcacccagatggcagctcacaaccatctgtaactcttaattctgggggatctgataccttcttctgacctctatgtggaaacatgcatacacataagataataatgaaatgaaaaggaggtaatgtcaggagcgcagacctgctcatgggagaaccatcatggaccagtcttggaggagggtctgccaacttagctattcattgctgcagcccgtgtatctctcctctgccctttccagtgggatgccttcagcatgcctgaactgcacaatttcctacgaatcctgcagcgggaagaagaggaacaccttcgccagatcctgcagaagtattctcgttgtcgccagaagatccaggaggctctgcacgcctgtcctttggggtgaccttgggtctccatggatgacaggaggagaacaggcagtgcaaagagcgtgccgtgtgagtgtgacagggcctgtggggcctgaggagtgcgtgtgcatggaggtcctcctctgctgaccgggatgagcccagagaacagggaaagagccagccgtctacctgtggatatagtggggcggggctttgcatccctctgcccgtatgtactgggtcatactctgcgtagctgctcaagtcacagggtcgcagctgtgagaatcttagagactctacagacagaacaaggttatattttcacgggtaagagaccttacctatggaggaagattgttttgagtcatgaatgggtctcaggatagccctatcagagccaagggtagctgctcagaataatacaagcaattaaggtagagtctggggttccctcttaccgtgccttctgacttccaaacaaacaccctggggtcagagagggctggccagtacaacaactacagtggctcagtcagtgcctcctctaagggaaaggttgctggaccagaccctcttcttgtttgccaaagccagagtctccctcagatatttttgatggaagtgtatgaatgtatgtaatgttttgtggcctcaactgaatgcctcctgtggggaagggatgggggtgtgacagtcatcatcagggcctgatgcctgagagaattggctgaataaagatgtaagaatttttctggttttggactctatagatgtgggcccccagtcggggtaacacctaatgaaagactgccaacaaagattgacacatccagagtgcaccctctccaaggtcgcagtgggaccaatatgttcaggaaatgtatgcctgtggattcaggtgtctttcaaccctccagggctcaggtcatgaagagacaagaataagctacagttactacacaggaaacttttttctccaggccaactcagagaaaccatagcagtaaccccttctccaaaaaactactcgtgggtcccacacttcacatgctaccaggggaaagctggtaataattattttcctgaagaatgttctctggtgaacttacaacacttagtttaagttccttcagacctcaaatatactcttaagaaattgatcaaaaaagttttaaaaagaagtttggctccctgtgcggttggtcactcctttaatcccagtattcgggagacaggcatttgagcgtcagccatttatacatggcaagtgccaggccagctaaggctacatagtgagaccctgtctccaaaagaaaaaagaaaacaaaaacattaagcaagatccgtagtttctttacaggcaaatgtgacaactgcaaagacacagttgtgaaaacagccaaccttagcctcagacaggcctaaggtcccttaggggtggaggggtgaccctaattgactattgctactgggccggagttttgggcgtgtcagggacgtagagacaactataccgggtccgaccttaaagtcaacaacaacacattacctccgcctttctggaagggagctgtcccagctgacccttgggacccataggcttctgggacctggaggcagcgcatccctgtggtggtcagcctctgagagtggccattggttctacaccacagactgacgagacctttagccactcagaggaggcaccgtgcaggacgcgcggaagcggaagtgaggtttccgtggagacagcagagcctgcggaaggcggcggcggcggcacctgcgagtggaagctggggcagggcatggtcgcgcccgccgcgctgtgagagcggagcggccgctgggtccgccatgcgcccgcggcgctgacatgggcgccagcggctccaaagctcggggcctctggccctttgcctccactccggggggcggcggcccagaggcggcaggctccgagcagtctctggtgcggtctcgagcccgagcagtgcctcccttcgtattcacgcgccgcgggtaagggcatgggtatctgcctttgggaggacatccgggaatgagaaacgcccccctacatttgaatcagacgactgtcatattttgggtcccagtcaaagcaaggagaagggaaaaccaagcggcgttcagctcttgaccgcccagatggtctttttagagaattgcctgaggttcgtctcttagggagcagctccataattcagctaagacggcatctaagagtcttaaaacctccctttcatccaactcagcctgcaaattaaaggcatttatgtcccttctgttcttctaagccttagaagaaatctaagggaagatgaccttctgtttaggtgtcttgccttcctcactgtgaagttggacctccgagaatagtgtctggaaaagcagagaaaggcgtcagtgttgaaggtggggccacaacaaaaaaagtgccctcaaccagttgggttctctagatctggaacactaacctaaccttcttttttcccaggtgctcacacaaaatggcctggacctagtgagctcctagggactggcattccctgtgatggaaatttgaccgtaaataccagagagacccaacagtgtcgattagacagtgccagccactggggaatgacttggagtgcagccttctgggctcagacatccaccatcttggtctttggccctggaccagcagtgtctttagaagtgagaccagtatgcccaggccactaccccacccactccataaataagccctaggtgaagggcctgctactagaatcatgacctttgtgaaacagaccagtggtgaggactaactttagttgcctagagagggtgctctgatgtgacatcctgttggtatgacagggcaacagtggccttgtcacactgcctgcttccctccgggcaccaagcaaagagttcttccacggagattaccgttgtgcgtcttctcttggggttcagcgtacttccctgtggtctgtggcccttgccaaggccagggatgaggctccaatccagcctgttccccttctctccacagctccatgttctacgatgaagatggagatctggctcacgaattctatgaggagacaatcgtcaccaagaatgggcagaagcgagccaagctgaggcgggtacataagaatctgattcctcaggtgagggtccgagcagtgatcataaagcctacatcagtatgtcaacggagatacagatggggctttctgggggaagagctgggaagaacagagaggctcttagcatagaggcccagagctgatcttcactagcctctgtttccatggcagggcatcgtgaagctggatcctccccgaatccacgtggatttccccgtgatcctctatgaagtatgaacctgtgtgtggcatggcagacacgagcacccactgccccagcaagaaactcccaggatcaaggtgtagcttccattcaggagtccaggctggtgccacaaccttgaataaactaaactccgttggcccagaaccttcagttgtaagaggggttgtccctcagtgttaactggtattggcggatgtctgaacaataagaggttggtggctggtgagggctaaggacagaattaccagcccgtctcccccagccgcttgtgggagaagcatgacaggagacacgtgccggtcaggaatgcctggttcctggttacctgcctgacctgctttcttccaagcttgcctagggcccagccctcctagaagctacagcactttacaagcagagtctgccttcttccagcccctgggctgtaggggctctacccaagtgggaacttccttttccctcactccccttcccccctagtcagagcatttcagccgtttgctacctcgattcctcctgtatcggacagactggagatacataccagcctcacccttcctgcctacctaccacatgctcccgctcttaagctggacactttgctggctgttcaataagaatgaggaccagtgtgggaggcttctcctttcacccagggctggactgatctctcttgatttcaaccagttgccctcaagttgagagggtacaggccggggtcaggacaggctactgacgcctgtacctgtggggacttgccccaaaccacatattcgtcgtctcccttgtctttgcaccagtcccacaaatccccagttgtaggggagaggcagtccaccacctagtggtaagaaacgactggggctggtgccagtagctatgaggagcccatccccccccttctccttacagtatctttaccccttcagggtctgttaagagaaagtactggagctccttggtaaggatagaaaggaggggaaaatacataagaggcataattaaaatgtgaaggtttgtaaatagtctagactatgataatgttggggcagagtctgatttctatacagagatggctttaaaaaaaatacttccttgtggaagctctgtgcttctagagtgtgggaaatggcttgggacgagtgatccccagcacaggaaggctgttgtgttatttgttcaatttcaataaaagttatttgtagaccctgcacacgagagtggcgtccagtgagactttaacatccagtttctagactgctgatccggtaaggctagcaaacccttgcctgaacattgcctgtagcaataccagccgtggccaacaggtggctgtgtccaagaactgtctccagccctctcaagacgcagagggccactcacctgtccattctgtctgggaatttggaaacagaaggtcgtgtgggatcctagggagattgccctagtctgaggtgtgagtgtagccacacacacagttgtgagatggttctggtcccaacaataccagattatgtgaagtgaggttacagcctaaaccccacagatcaaggcctacctatacttgaacaacagacacttcccaccatggccttggcctccttccaggctctgaagtccacactcacctgacttcccaaggcagccatcagaaaggagagcacaggcttctgctgcagcctctattgtagggctcggcccaacacctcctcagctctctgccgccaatggacattctgcctacgtttctcaaggtcggctatgagcaggttctctgctcgcctagcctttggccataataaactcaagacgtttttaaaaagcaaaagcaaaacaaacaaacaaaaaaaaaaaccaattgggaagcaggagtttatcaactcagggcagttggccttcaagttgctcaaagctggaactggtcaagtcttagcctgttcaacatagatttgcggttctgtagaccaactgtcatccctgtaaaaagccaggagttaggttcctgtccaggagccaaggctccccatatcaggcagtatcctatctcaccaccaccatcctgctcgggaaactccctgtcctggacctgcctagctaaccccaaagctatgaacaataggagagtcagggcagtgtttccctactccatccggctgggctaggctcacttccttcctgctggcagcctaaggaagtgtccctgccctggacagtctcgcctggcctttgttttcccagtagtccccacccttggagcttcctagatttttgtcccttgtgaagccaacacaatggtgaccacagcctaggctatacacccagctctcctgctttctattggcagagggactccctagcactggggaggtgagccccttggaccaggtgaggggttgtcagtttaggtagatttgaggtcaggcaaatttgcctggacctccaaagaggtcttccaggaattcctattgtaagtttcctctcccatagggacacaattctccccccaccccatatcacacagccacaggcatcaacacattgtcatattgtctttgtcacaggttggatacttccgctctcaatggaaaaaaaaaactgactcagctactggaagagcccaccacccccaccccacccgttttcccctcgtgcaggatggtttcttctttggcacctgctctaggggaccattcgctcaaccacccagcaaattgactcccatgaatacagccagccacttgggccccctcacaccctactggatttgaggatgatgcaaaacttggagaaagatgagcccttggttcctaggcccatatccttcccatcacctggcacaactcatgcagaccttcctgggaggaagggtgcaaagggcagccagccaccaagggaaacagggtcaaggggctctcctccccgcccccctggccctttccgcctggagggcagcaggaagtgaggagaaagagcagggatgggaggcgggagggagtgggtgggaaggaatggggtttatcaaatccccagcagactgcccagagggcagcagctggcgcaaggaacctggctggagagactctactcaggtgagcgcagagtagtacataaagctagtccgcactgccataaatgcgtgtactcctgcggcgctccctagcttccaagcttgcggtagggaaaggggctggcggccagaagcggactttcggagatttgagtcgtgcattggagagcagatctaagaggcgagggtacaggtctaaacctagtcctcactggaaggggattgcaaggcagaaaggttcagaatatggagtcggggtactagggagacactgaagcctcctttctacgaagtcaggcccgaaactttggcaaattgctctttatttggagttgagtgggtacccctatggacaaccatcccaccttcacctcgtcgcagagactggtctggggagaatccagtaaattggcaagccctggcgtggatccggtgaaagtggctagatcactttcccctttggcccgactgaacttcaatccctttggcaaggcagcgacccacccccctggttaccaggacaaccactacgtctgctttgccaaaggagggctcagaagctgtactaggccccctcctctagacgagcaaaaggcggggtttccttctgaccgcagacagactagtggagggaacctgggctcagcgaaggcgggtcattaatgttccaagaggttctggatccactcgtgtcaaaatctcttacactagacaaagggcccactttgctagagtccatattcagacaggtgggattgaatccgcagctacccccagtcaaggcttcagctataagcttttatttcaaatgccattaccaccactacaccctcattccgctcgcgcccgccccatccaatgttctatccctttaagaggccagctgcaaagagtggattgttccactgacgacagattgtgggggtaatatctcaggctggttagctctggtggctaaaaccagcgggaatccccattccaggaggtattcaatctcagatacataactatgttcctctacagaagatctaagggtcctcgaactcgaaacgcagcactggcaaaaaggaagagaaacacaccctccctacgaggccgtaaattctgccatccacccacctccgaggcaggattcttaaagggcccgcgggcctcggggcggagccaacagaggctcgagctggggcagtgcttgggcgaagggccggatcgggcttggttggtaccaggatggcggcggccctggcgtgggtcctggtggcgcctggttcgaggtgagggcgggcgtcgcaagcctggtgactctcttcctgtgagatgggctctgaatctctaggggcgccctcataagtgacccaggaaccccacccccacccggctgaactctggccccacgtgcggggcgggggcggggtcccgcacaaagaccggagtggaatactctttacccgggaccccttgtgctgggaggtgagggtgtgggccggtcgcgaagtgctcacacagattcttggtggctgtggtgggaagggcaggtcggcgagcaccgcggtgggaagtccgctgcccctttgtccccggggcgcctcctcctatcctaagagtgtcggtgcccgagactaagtcctgacgttcttgctcttctgcttggcgcacattgcacagatagcagttcctctgcagtgtacctaacagcttcccagcttctgtatgcgttgtgccccaaatgctgtctcttctcagaatcaattctgagttcgtaatgagggtgggggacatggggtgttcagagtgttttaaaactatttactgtatggtatacaggcatgtaagtgactctagcagtgagtcggtagcctaatcagtccctttttcagaaaggatatggacctaaaggagattcttgcccaaccacgggcagctccctgctctagaaagagctctgtggtttcggtaaattccctaaggtcttttgcctacccatcagcatcctgctatctcccaaacctgttacagcctcggccatctgagcaggagcatggtgtgccgcacagtatgggtttggggagtttatgtgggatgaaggtgcgtacacatctctggaatttgctagactgacttgttctctctcacactttcttcagttcctgagctgctaccaggcaggtaacacttcctgtagcccccagcatgcgggcaggactaggtcccatcatcacactggccctagtgctggaggtagcatgggccggggagcttaagcccacagcgccgcccatcttcactggccgaccctttgtggtagcatggaacgtgcccacacaagaatgtgccccacgccacaaagtgccactggaccttagggccttcgatgtgaaggctacaccgaatgagggttttttcaaccagaatatcaccaccttctactacgaccgtctaggcctgtatccacgttttgatgcagccgggacatctgtgcatggcggtgtgcctcagaacggcagcctctgtgcacacctgcccatgctgaaggaatctgtggaacgctacatccagacccaggagcctggggggctggcagtcattgactgggaggaatggcggcctgtatgggttcgaaactggcaggagaaagatgtttaccgacagtcttcacgccagctggtggccagtcggcaccctgactggccatcagacagagtaatgaagcaggcccagtacgagtttgagttcgccgctcggcagttcatgttgaacactctccgttacgtcaaggcagtcagaccccagcacctgtggggcttctacctctttcctgactgctacaatcacgattatgtacagaactgggagagctacacgggccgctgtcccgatgtggaggtggcacggaacgaccagctggcctggctctgggctgagagcacggctctctttccctctgtgtacctggacgagacactggcgtcctccgtacacagccgcaactttgtcagtttccgtgttcgggaggcccttcgagtggctcacacccaccatgccaaccacgccctccccgtgtacgtctttacgcgtcccacatacacccgaggactcacggggctgagccaggtacgtgttctcccttcctctgggagccactgcatgcttgtgttatcggggaccagaagtactattccatatctgttttagtcttgtggaagggtgatgtcacccccattctgtagataagaccgaggcccagagatgctgagaggtagccaggagcctgtagcaagtccgtgaaaagtgcacagaactaaaccaggcatcctgactttggggtcagaatgtgtaacctttgactttgtgggctcatgcgtgggctcttggccttggagactaaggtccaaggtgaggatagaaatgggcagagcggcctctgcctgtctagaactgtcctaaggtcagcaggttagagcaggtctgttctgagtctcctgcgacaccgtctggtgccagtcttgctcaggaaccatccctccccacacaggtggaccttatctctaccatcggtgagagtgccgccctgggctcagctggcgtcatcttctggggcgactcggaagacgcttcaagtatggtaagggagacccacctggccttccagggctgatgaagagtgtatactttggcttctgccccccacctgggtgtacacactgagtatagcttatctcctaagcatagcagctttgtccctggacccaagagggaagaagggcacccccaccctgttcccaggaagaggaaatgctatcttgaacagctggagttccgcccttcctcatccacacagctgggctccagtctgtctcaaccccgcttctcactagggacaggggactgactataaaggctcgggaactctgtgtatatgtttacatacatatgcaaataaatatgccagggatgtgcctcagtagagtgcttgcctagtctagggttcaaactccaccactaccaaaagaaagaggcgctatcaccacagtttccgtcggggcttgggcaaaggtagctaacatcagacactcactccttaaccttggccttttccaggagacctgccaatacctcaagaattacctaactcagctgctggttccctacgtagtcaacgtgtcctgggccacccagtattgcagttggacccagtgccatggccatgggcgatgtgtgcgccgcaaccccagcgccaataccttcctgcacctcaatgccagcagcttccgcctagtgcctggccatacccccagtgaaccccagcttcgacccgaggggcagctcagcgaagccgacctcaactacctgcagaagcactttcgctgccagtgctatctgggctggggtggcgagcagtgccaacggaactataagggggcagctggaaatgccagcagagcctgggctggatcccacctcaccagcctgctgggtttggtagctgtggctctcacctggaccttatgagggatctctccccctggatatcagtccagctggcctctggtgcaaggatctccttggcatgaggggcctgttaggggggagacaaaagtctggagtaggcagtgctcccaggatgcttagcagagcacccataccatctgtcacccccctgttctaagggggagagaaacatcccctgagatgccctcatcttgccagagaagatggagaatcaagctaggccagagaaggcctgactctactccctgctcctggatagtttataattttggggtctcttttgtaaattaaatataaaacaactcctgtgcttcttgtctttttctgcttcgaggttagtgtgtgagagtgctcagggctacccaggaggtggagctcagctctttgaatccacatgctggaacttctcagcagtgtgttcactggggcctagggaagaagggctactgagtctgcacttgtgctggggcagggctcactagaataaaattcatactctaccctaacatcaactccactttatcttgatagaaatagagtggggcccaccattgtatgactgatagaactagctcttttatctgccacctgccccagtatcccaagcagggtcagcactagcttccttacctcaaccacacatagaaaaggggacatgatcttccctgatgttcctacaatagagcagcatttcttttccttttttttttttttttttttttttggttttttgttttttgagacagggtttctctgtatagccctggctgtcctgaaactcactctgtaaaccaggctggcctcgaactcagaaatccaccagcctctgcctcccaagtgctggaatcaaaggcatgcgccaccactgcctggcacagttgagcatttctgttccctgctcccaagggcagtggacctgttcctctccctgtctggttcatacccttcccttgaggctggcaggtaaggaggctggcaggggattaagatgtcagtcttgagctgtcagtctgtcactatgagtgtgaggtggtgctgttgggtactatccagatctggggagcagggtcaccctcaaagatcagctttggagctagaatgtgtgtgtgtgtgtgtgtgtgtgtatcagtgctttatcagtgtttatcagtgataaagcacttgcttggcatgtgcaaggccctgggattgatcactagcactatcttgaaaaattaaattaacctaacaagaatgttgagacaagagtctcactgtacagccctagctgccttagcactcagtatgtgtagatgaatctggtcttgaattcagagatccacctgcctctgcttcccattcactggaattacaggcctgtgtacaccagacttaataatttaaaacctgaagaagagggctggagagatggttcagcagttgagaacactgactgctcttccagaggtcctgagttcaattcccagcaaccacatggtggctcacgaccatctgtaacagggtctggtgccctcttcaggagcgtctgaagaatgcaatggtggtgtactcatgcataaaataagtaagtctttaaaaaaaaaatctgaccagtcgtggtggcgcacacctttaatcccaacacttgggaggcagaggcaggcnnnnnnnnnnnnnnnnnnnntctcaaaaaactaattaattaattaattaattaattaattaattaattaaatctgaagaagaccactcaaaaaaccaaccaaaaagataaataaaaataaaagaggaggaggaggaggaggaggagaaggagaaggagaaggagaaggagaaggggaagggtaaggggaaggggaagaggaagaagaagaagaagaagaagaagaagaagaagaagaagaagaagaagaagaagaagaagaagaagaagacagactaaaagcaatggagcttggcaaaggacggcaaagacaagggagacctcttgtcttcctcacacctgtgactcattctgttgtaaccttttctattcatccatgttctctatggtacctgtcaaccttctatgaacattgaccccccccaatatgtatggatacacacacaactgttagcccaagggtgggcatggaggacagaagaaacatctgcactttccccatgcctgtaatctgtcctacaagttgtgacctatgtccatctagctttgaacacactcttggggcaaatcctgtccaccacttcacatttcttcccctgaaaccccagggactatgtagctacttcctctaacttaaaaacattccctccaagaaggttaaacaaggcacataaaactcagctgccaagtgatggtggcagcggcacaggcctttgatcctaccactctggaggcagaggcaggcgaatctctgagtttgaggccagcctggttcctgagttccaggacagagaaaccctgcctcaaacaaactccttagaaagctaaggaaacttccctaagctctggagattcaagaagttaataatttgggtgagcaaaatggctcagagggtaaaggcatgtgagacctgatgacctaagctcaatgcccagagtcggggtgacagaggagaaaactactgacttcacaggccttccattgacctgtgtgtatgactgtgattatatgtcacctctgtgccagaagaagatgtcagcatctctggaactagttgcaagccacttggcacgggtgctgagaactgagctccagtcctctggaagagcagctaaattctcttgataattaaaaaaataaataaaaaatatacatgcacacataatattaaaaaattataagattcacaaggcccctctccaaaactaaaaagtaataaataattgctggagaggcgctacctacaagctggcaagctgtaccaaagctacaacttttgtcaactgttgttctggcctagggtcgaccttttggtgatgcagctgtctttgagtgtcccatgcttctgtaagcagctccctatgttcctccggtaatgtggccccgaaacctcattgatttaccaagctagacttagaatcaattctctcacctgtggtcacctgtggtgtctggaaatgaatagaagattgttcacggaaaaagtcacgtgacaccacagtctctgagggctaggggaaaggtcaggttaggaaggtggggtagatcaaaggcactaagcacacactgccagggaggccacgcctatatggtagccccaaggtgaatgcctaaggggttcggtcattcagaatcagacacaactgcaggcccagacaactgctttattctgggcggggccatgcctttcccttctactttcctaacttggcaggcaagcccggacctgagcaaccagatcatctcagtaagcagcctgtgattcagtgaacttgtaactcacaactgcatgaacacacacgttacttatgcgtgtactcactaatacacccctgctcatttccacggccatgcagatccagggtctcacgatcaccaaacagcaaggtctcgtacatcatcccaggaactgagtcctcacacttgcaggtataaatacctgggaatttgggcacgagcccagttaccaactagagcgtcacaaagatgcaat

SEQ ID NO: 182 - DNA, 1482 bp, Mus musculus
ccggggggcggcggcccagaggcggcaggctccgagcagtctctggtgcggtctcgagcccgagcagtgcctcccttcgtattcacgcgccgcggctccatgttctacgatgaagatggagatctggctcacgaattctatgaggagacaatcgtcaccaagaatgggcagaagcgagccaagctgaggcgggtacataagaatctgattcctcagggcatcgtgaagctggatcctccccgaatccacgtggatttccccgtgatcctctatgaagtatgaacctgtgtgtggcatggcagacacgagcacccactgccccagcaagaaactcccaggatcaaggtgtagcttccattcaggagtccaggctggtgccacaaccttgaataaactaaactccgttggcccagaaccttcagttgtaagaggggttgtccctcagtgttaactggtattggcggatgtctgaacaataagaggttggtggctggtgagggctaaggacagaattaccagcccgtctcccccagccgcttgtgggagaagcatgacaggagacacgtgccggtcaggaatgcctggttcctggttacctgcctgacctgctttcttccaagcttgcctagggcccagccctcctagaagctacagcactttacaagcagagtctgccttcttccagcccctgggctgtaggggctctacccaagtgggaacttccttttcctcactccccttcccccctagtcagagcatttcagccgtttgctacctcgattcctcctgtatcggacagactggagatacataccagcctcacccttcctgcctacctaccacatgctcccgctcttaagctggacactttgctggctgttcaataagaatgaggaccagtgtgggaggcttctcctttcacccagggctggactgatctctcttgatttcaaccagttgccctcaagttgagagggtacaggccggggtcaggacaggctactgacgcctgtacctgtggggacttgccccaaaccacatattcgtcgtctcccttgtctttgcaccagtcccacaaatccccagttgtaggggagaggcagtccaccacctagtggtaagaaacgactggggctggtgccagtagctatgaggagcccatccccccccttctccttacagtatctttaccccttcagggtctgttaagagaaagtactggagctccttggtaaggatagaaaggaggggaaaatacttaagaggcataattaaaatgtgaaggtttgtaaatagtctagactatgataatgttggggcagagtctgatttctatacagagatggctttaaaaaaatacttccttgtggaagctctgtgcttctagagtgtgggaaatggcttgggacgagtgatccccagcacaggaaggctgttgtgttatttgttcaatttcaataaaagttatttgtagaccctgac

SEQ ID NO: 183 - DNA, 333 bp, Mus musculus
atgggcgccagcggctccaaagctcggggcctctggccctttgcctccactccggggggcggcggcccagaggcggcaggctccgagcagtctctggtgcggtctcgagcccgagcagtgcctcccttcgtattcacgcgccgcggctccatgttctacgatgaagatggagatctggctcacgaattctatgaggagacaatcgtcaccaagaatgggcagaagcgagccaagctgaggcgggtacataagaatctgattcctcagggcatcgtgaagctggatcctccccgaatccacgtggatttccccgtgatcctctatgaagtatga

SEQ ID NO: 184 - DNA, 23328 bp, Homo sapiens
agatccaactgttgagcaggcctctctgcctgtggccttccggccggtttccagacgcccaggtggccaacattagagtccgcgtagcagtgtgaggtaacccactgagataggtcgggcctgcggagcctggcgagcagcggccctctccctggggcttcccttcaatctccgggacatttccccgacctggagctcctccgcctcaccgccaggcctctctgcagattgcaagttcacctgccactaccgctgccgcgcgctcgtctgcctggactgttgcgggccccgggacctgggctgggaacccgcggtggagcgggacacgaacgtggtgagcgcggggccgagggcgtatgggaagggcgaggatgggcaggccacagtgcaggcattctcgagggctgcctgggtgccgcgcgcaaggagcgttctaattgccgatttcccggcggcacagagaggctaattctgcgcgggggctgggaggggagcctggattgccggctccgcaagtactccacccgctgcaagcggacccgggcccaggctgacccaggctccgcgcacgcgcacttcccgcaccttcccgccctcgcctccggccagaggccactcttgtgcgcttgcccggacgctggcacccgcccccgttccctgtggtaggtggggtctgtgagtggagctccggagcgatgaggtcattcctgggggcgaagcgtgcgtgtccccgccccggcgttcctgccccaatgagacaagagctagatcccggcgatctacgtttcagtcttaacggttgcggcgcggctctggcccgggcgcacgcgcacactgacacgcgtacacgcacgcacgcgaccggggcggtggttggcggctacggacgcgcaggactgggggacgggcgggtacggctatgggcgaggcggaggcgccttctttcgaaatgacctggagcagcacgacgagcagtggctactgcagccaagaggactcggactcggagctcgagcagtacttcaccgcgcgaacctcgctagctcgcaggccgcgccgggaccaggtgggagccagggggtgccggcgggcgggaggggaagcggtcgctggagctccgccctccccggtccgttgccgcgtcctgggtcggtgggcagccccaccctcctggctacgtggctccccgcgggtcctggccggggacctgcccgcggaaccgtgcgtaagaccccgattccaccgcctagatgctgggtgccggggcccccttggtttctgtcacagacaggttgaacacggaaaaagcagctgtatggcttgtggtagacctgagccgggcattatccagctatgactaaagccgaccgagcagtttggactagcacctcgatttccgcgttcgaatgctcctgctccctccttggggagactaggggaggatgtggagagggaagagtcctcgccaggaattgagaagtatgtttaggaaaacttgagaggcagagagagatcctgctcctccatctgcactcctgtatggagccagctgagccctcacctcttccctgttctggcctgtcaccagctgctggaatgtggaagattctgttcccttcctctagggtggatctggagaaagatttgggaatagataggaaagaagtcttgttttggaccataagcattcaggagcactttacccacaggaagggggaaagctagattataaaatgcctaaagaggtggaaaaagagatccaggttactaacccaggactgtaaggtgtctcggaacctcctaggtatccccattatcggagaactgtgtgccagatgccattggtgtgaccaccaggctcagagaaccaggcctaggcaccaggaaaaagaaacagggactgtgaagctcagtatgcctggcagaaatggggcggaaatccttatttaagtaaagaaagtggagttgtgagtgatgcttcagataaaattttacaaaattccttacaaaatgggtggtgctcagcacgccaaaatcttagcccagagcttgggtgcaagggttgagttgagtgtagacccctgggcttgtcttcatgtcagtcagtcctgagccattttccactgtggaaaggtgggaaaaccacaagacactaaccaattgaaaaggagggctagccacggaggtgcacacctgtaatcccagctacttgggagggtgaggcagaaggatcacttgaacctgggaggcagaggttgcagtgagccaagatcgtgccactgcactccagcctgagtgacagagtgagactctgtctcaaaaatagaaaaggaagccaagtacggtggctcacacctctaatgccaatgctttgggaggccaaggcaggtggatcatttgcaatcaggaattcgaggtcagcctggccaacatggtgaaaccctatctctactaaacatacaaaaattagccgggcatggtggtgtgtgactgtagtcccagctacttgggagactgaatcacttcaaccgggaggcaaaggttgcagtgagccaagatcgtgccactgcactccaacctgggtgacagggtgaggctctgtctcaaaaaaaagaaagaaggctgggcttggtgactcatgcctgtaatctcagcattttgggaggccaaggcaggcagatcacttgaggccaagagttcgagacctgccaggccaacatagcaaaaccccgtctgtactgaaaatacaaaaaaattatctggccatggtggtgtgtgcctgtaatcccagctactggggaggctgaggcaggagtatcacttgaacccagaagacagaggttgcagtgagtcgagactgggccactgcattccagcctggatgagagagcaagactctgtctcaaaaaaaaaaaaaaaaaaaaagaaagaataggaggctgagaagtcccaagttatatgttaaaaaaaaagaaaaaaacatcagttttaggccaggtgcagtggctcacacctttaatcccagcactttggaaagccgaggtgggtggatcatgaggtcaggagttcaagaccagcctggccaaaatggtgaaaccccgtctcgactaaaaatacaaaaaattagccagttgtggtggcaggcacctgtaatcccagctacttgggaggctgaagcagagaattgcttgaacccaggaggcagagattgcaatgagccaagatcgcaccactgcactccagcctggaaaacagagcgagactctgtctcaaaaaaaaaaccatcagtttttatggacagtggtagagtggagggtgggtccctatggtgcagaagggaaattccatggtcctgctgtgcatccgactgggatggctgttgaaatcctcttccagcaggcagctttggaaacagaaaaagaaactcttcctcctttagaatcctggaagggctgtgcagtgcctctaatccaagtctgttttctgagtgaagatagggaggttcatcaccagaagggaaggggctggaaatgaggtcactgcatcccagcccagggctcctgggtcatccaggaagggaagaaggagcaagctttctcattgttaggtaggagctcagagccatcacaagaacaagttagcaccatccctgtgccctccctgttctgcaaacaaaatgatcttccttcttgccctggcactagagtctgtctggcatttctcctgcccctagtactcctcccatctgggtacttcttcccgttggtgtactgaacaaacacatccactgctttattcacagcctccagccctcattttccagggcccacaccatttgtttttactaacccgacaaggttgcccactgtccccagtaaggtttgtactggggtttttactccagtgctcttctccatccaggagacctttggatacttggggaagaaaatgagcttaaattcccacccctccccctttacctttttcctgtaaggccctggccttagttcttagccccacatccttgctggctgcagaatagcagcgggttctgggtaaggagcattctgctaaaacgctccaccctgctccctcatctgtcctctccatttgtccccatcagatggtttaagtgcttaaggggactccagggcggagtcagggagaaccctggctctcctgggctaggcacaagatcattctacaggaaaccttgtgggaattcttctgggacaaattattggtcagcgctgagcttagctgtgtctgtgacactcgcattctaactagggcctatctgacgtcaacaggaagtaaggctgatgcagtggggccaagggagtctgggagaagaaagtcggttcagagccctggctgccctgtcccacactccacccttccggcaagaatccagtccctagatgaggtggggagtgagtggtcgagttaaaaatctctgggtcgggtacgatggttcacgcctgtaatcccagcactttgggaggtgaaggcaggcggatcacttgaggtcaggagttcaagaccaacctggccaatgtggtgaaatcccatctctactaaaaatacaaaaattagccgggtgttgttgtggcacgcgcctgtagtcccagctactcgggagtctgaggcaggagaatcgcttgaacccaggaggcagaacttgcagtgagccaagatccagccactgcactacagcctgggcgacagagtgaggcttcgtctcaaaaaaaaaaaaaatctttgggccaaatctccagacagcacaggcaggtgcagaaacccaccaggaagctgcctgtgtacctctggcagattggagcctggcctaaagctgccttttatgcagcttgggtcaaggttaaacatcatgtcacagtgatttttctcactatgtgtgagacatggagaactggctccaagtactactctgtccactggtggctggactactgatgtgcaccactctccactcctctcaccctgcagtgggtcatggccccgtgccggggcagaggagaaaaatgggctgccttctccaggacaaaccctcactccaactcaactagggtgctgtgatcagaatgtgcaattgaggtgtgattttactgattttttttttttttgagaccgagtttcgctcttgttgcccaggctggagtgcgatggcacgatctcagttcactgcaacctccacctcccgagtttgagcaattctcctgcctcagcctcctaagtagctgggattacaggcatgtgccaccacgcctggctaattttgtatttttagtagagacggggtttctccatgttggtcaggctggtctcaaactcctgacctcaggtgatccacccgcctcggcctcccaaagtgctagaattacaggcgtgagccaacgtgcccagcctgtttttgttttttgtgttttgaagcagggtctcactcagttccccaggctggagtgcagtgacacgataatagcttactgtagctgcaatctcccgggctcaaacgatcctcccacctcagcctcctgaacagttgggactacaggcacaccaccacacctggctaatttttttttttctttttttagtagagatgaggtcttgctatgttgcccaagctggtctcaaactcctgaggatcaagtgatcctcctaccttagcctcccaaaatgctgggattgcagatgtgagccaccacacccagcctgattttactttaaatgagagtccctcttcagagtccctcagctgttcctggcccctggccatgtgccttcagttgcccctgcttctgtggtatccttaaggctacattcagtgctgaggccctaggcaggcagcagagagaagccaaatgattctgtctttcccttatccacccagagcatgcaaaaccaggagcagtggtgggttcagggtgggcaccagctatgtatatgtacatcagggacagggggccaaaggcagtcagtttccaaagactgccccagaggccatttttcagagaagccctgggttcctcaagggccctgtgtccatgctggcccatcttgcaggacgagcctgtggagtgggagacacctgacctttctcaagctgagattgagcagaagatcaaggagtacaatgcccagatcaacagcaacctcttcatgagcttggtgagttgactgctcaggaagggggcgtggggaggagcaggtacccagctatgtgcctgatactcagagggtcacaactgaggttatcttgggtgggcgcaagcagtaatttgtgcatacccagcctagccccaagtagactgacatctcacctggaacctattatcaaggtttggtttctctatttctttagaacaaggacggttcttacacaggcttcatcaaggttcagctgaagctggtgcgccctgtctctgtgccctccagcaagaagccaccctccttgcaggatgcccggcggggcccaggacggggcacaagtgtcaggcgccgcacttccttttacctgcccaaggatgctgtcaagcacctgcatgtgctgtcacgcacaagggcacgtgaagtcattgaggccctgctgcgaaagttcttggtggtggatgacccccgcaagtttgcactctttgagcgcgctgagcgtcacggccaaggtgggcttcccaccccaccctgccctatgtgagggtatatacgcatgcacctgagcatgcaggggctgagcagctggccctgtctctgatcattacttccccttcacagtgtacttgcggaagctgttggatgatgagcagcccctgcggctgcggctcctggcagggcccagtgacaaggccctgagctttgtcctgaaggaaaatgactctggggaggtgaacgtgagtacatagttcttagtttcttggttgtcactagacaggactgatgggctgtagctacagtaaggcttggaggaggaattgtgctggaagacaagccctgcaaaacagttccaggagtgtataggcattgtaactaaagcaaaggcttccagaccactcatgccaaagcctagggttgtcccaagaagccaggaagaattgccttggtgctttgatctttcctggtgtggaaaatcttctggagatgcaggagtccatctaatgacatgaggaggcccccttcagactttttacctggaagctttctggctccaaggtattaggcctgtggagtgaaattagactcagaatatgcctgacctgtccacaggtaattggggaacatctgacttggttgtctcagtaaggtgaccgttttgtagggcccatcttccatacaaactgctgtcagggatcctaccagagatcattcagccaagagcctgacatcagaaagcccagtcctagcttgtgtgaacatgaggtgctagtcttctctggggagggtctgctggcttggccatcccttctgcagcctgtacactccccttttgccccttgcagtgggacgccttcagcatgcctgaactacataacttcctacgtatcctgcagcgggaggaggaggagcacctccgccagatcctgcagaagtactcctattgccgccagaagatccaagaggccctgcacgcctgcccccttgggtgacctcttgtacccccaggtggaaggcagacagcaggcagcgccaagtgcgtgccgtgtgagtgtgacagggccagtggggcctgtggaatgagtgtgcatggaggccctcctgtgctgggggaatgagcccagagaacagcgaagtagcttgctccctgtgtccacctgtgggtgtagccaggtatggctctgcacccctctgccctcattactgggccttagtgggccagggctgccctgagaagctgctccaggcctgcagcaggagtggtgcagacagaagtctcctcaatttttgtctcagaagtgaaaatcttggagaccctgcaaacagaacagggtcatgtttgcaggggtgacggccctcatctatgaggaaaggttttggatcttgaatgtggtctcaggatatccttatcagagctaagggtgggtgctcagaataaggcaggcattgaggaagagtcttggtttctctctacagtgccaactcctcacacaccctgaggtcagggagtgctggctcacagtacagcatgtgccttaatgcttcatatgaggaggatgtccctgggccagggtctgtgtgaatgtgggcactggcccaggttcataccttatttgctaatcaaagccagggtctctccctcaggtgttttttatgaagtgcgtgaatgtatgtaatgtgtggtggcctcagctgaatgcctcctgtggggaaaggggttggggtgacagtcatcatcagggcctggggcctgagagaattggctcaataaagatttcaagatcctcctgctgttggaatcttttatacatataaagtttttgtagagacatgagtctctctgtgttgcccaggatcctcccaacttggcctcccaaagtgttgggattacaggtgtgagccaccctgcccagcctggactctttattattataggcgcagagctgcagttgcccctcatggtgccagaagttgccaagggtgatggacaggctcccaggtgtcttgcaaagtcaccatggaccaatttgtgaagatgtagtatgcatacatacttggtcatcactcagctccctggggctcaggttgtggtggagacaaaaatggactgcagttagaacttagggaaactggctgggcatagtggctcacacctgtaatcccaacactttggttgggctaggtgggcagatcacttgaggccaggagttcgaggccagcctggccagcatggcgaaaccccatctctaccaaaaatacaaaaaaaatttagctgggcgtggtggtgggcgcttgtagtcccagctactcagaaggctgaggcaggagaatcgcttgaacccggcaggcagaggttgcagtgagtggagatcacaccactgcactccgatagagcaagactccaactcaaaaaaaaaaaaacggccgggcgcagtggctcaggcctgtaatcccagcactttgggaggccaaggcgggtggatcacctgaggtccggagttcaagactgcctgaccaacatggtgaaaccccgtctctactagaaatacaaaaaaattagccggcatggtggcagatgcctgtaatcccaagtactcgggaggctgaggcaggagaatcgcttgaaccctggaggcagaggctgcagtgagccgagatcgtgccactgcacattatcctgggcgacaagagtgaaactccatctcaaaaaaaaaaaaaaacaaaaccatcccttcaacacacacacaccacgctctgggagaaggtgtggcataactccttcaccaaatacagagctgccaccgtggaccagacactgctcgtgataccgagggtatagctgttaacaattcttgctttcattaagcatggactctgctgggtttgaaaacactgaattcgaagttcttcagaactgaatgtaactatgtgaatctggccagttccttaattttctttcaacttggttagttcacataagcgtggcaatcgcaaaaatacagctgtgaaaatagaagccagatgggcacccggcggtctggccttaggccctgaagtgcaggtttgaggattggtgcttgcgaagtcctgctaggcctgaactcaggtgttgggggacgtcagagccgccaaatacacccaaaagaccgggaggactcacggccaccactttcctcggtgggagctgtcccagctggtcagatcgcgcttgctgggacctgggatctcgcaacgcatgctgggatgcccagcatctaagggcgcccattggtcccgcccccacgacttgagcaacagccaatcagaggtggcagcgtgcggaagcggaagtgaggtttccgtggagacagccgagcctgcggaaggcggcggcggcggcacctgcgatcagcggctggggcaggttatggtagtgcggactgcggtgtgagcagagcggccacggggcccgccatgcgccggcggccctgacatgggcgccagcgggtccaaagctcggggcctgtggcccttcgcctcggcggccggaggcggcggctcagaggcagcaggagctgagcaagctttggtgcggcctcggggccgagctgtgccccccttcgtattcacgcgccgcgggtaagggcatgggttccaccctggcggggggaacaggcgggcggccaggcgtcccgcgccacgggggaacttccaccgctgtaccccactacagccaagccaggacgacccccatattttgagcctcattggagctgggggtggagaaagccgggcagtggtctcctggcggcctggccactctgaaagtctccctagggaagagtgggcctgaggcttgtcactggtcggaccttccgcacggtaaagctaagctagggcctccataagacctccataagatctcttcctttcatcccttccggctcagcctgcatactgaagggtcctagcctccctttcccccccagttattccaaggggataataaccctctgtttaggctgcttttcctgacagtagtggggctgaacctttgagcgtagtggctgggaaagcagggataggcctcagtattgggggtgaggctgaggaaaaaagaccctcacccagttatgttctccagatccagagcgctgacctacccacccaacccccagcccagtctcccagaggcccgcacaagagtaccagattggcttggctctagtgggctcctggagatgggcgctccctgtgctagagatttggctgtagacaccaggaagacccaacagtggcaattcaccagccacctggggtgtggggtcaggggagacgcagccttcattcctttgtgcttcttcctagcttaggcttctgctatttcagtctttgacactgggccagcagcatcttctggagtgagaccaacatgcccaggccaccaccctgcccactctagaagtcctgggtgaaggcaaagtcctgatattagaatggctgcccttgctgaacaaatcaaggatgagaactggccttggtggctgcctggatggtgtgctctggtgtgggctctcttcttgggggtctgacatagtagcactgcccacccatcacctcacttcccactttcttctagtagaccccaaaccccaggcaaaggattctccaggcaggccaggcaccgtggctcacgcctgtaatcctaacactttgggagatgaagacgagtggattgcctgagttcaggagttcgagaccagccagagcaacatggcaaaaccccgtctctactaaaatacaaaaaattagcagggtgtggtggtgcatgtctgtagtcccagctacttgggaggctgaggcaggagaattgcttgaacccaggaggcagaggttgcagcaagctgagatcgcgccactgcacctccagcctgggcaacagagtgagattctgtctcgaaaaattttttttaaaaaaaggattctccaggcatattatcctcttttcttcccacttggggttgggaagaccacagacttccccgtgacctgtgacatttgccatgcccaggtgtggggctccagcccagcctgtttccttctccctctacacagctctatgttctatgatgaggatggggatctggctcacgagttctatgaggagacaatcgtcaccaagaacgggcagaagcgggccaagctgaggcgagtgcataagaatctgattcctcaggtgaggggctgggcagcggtcacagagcctacactaagcgtgtggaggtggacccagatgggatctgttgtcatggtgggggcttttgcggggggatctgggaggaacaaggaagcttcctgaagtagaggccctgagctgacccttactagcctctgtttccatggcagggcatcgtgaagctggatcacccccgcatccacgtggatttccctgtgatcctctatgaggtgtgaccctgggaggtggcagacagaagcaccccctgccccggcaagaaactcccaggctcaatcaaggtgtggcttccattgaggagcccaggctggggccacaaccctgaataaactctgttggcccataaccttcagctgtgagcgggtcggtcccacagtattggttgggtgttggtttgtgtgtggacaagaggtggttggtgggtggtgaaggctaatggcagagttagcaccccactctcccaagccacccctgcaagcagcacagcagggcatataccagtcaggaatgcccgttacctggttccttgcctggtctgctttcttccaagtttgcctggggcctagccctgctagaggctacagcactttacaagcaaggtatgctttcttccagcccctaggctgtgggcactgtatacaagtaggaacttcctttccttcacttcccttttaacccctagtcagagcatttcagccgtttgctacctcgattcctcctgtgttggacagaggctgggggcagtgccagcctgattcttccgacctacctgccatttgttcccgccttcagatggatggacagtttgctggctattgataggagtggggactgggtgggggcttctccctctacccagggctgggctgatccccctactgcaactaactgttgccccccaaccccgaacccccagttgaggagttgagagagtgcaggctggggtcaggacaggctgcggatgcttgtgcctatggggagttactccaacccacctattctgtctaatctccatggctttgcaccaaatcctccacccctccaattgggaggggactgttcaccaccttgtggtaagggacaacaccctaaggctggtgccagtagttatgagtagcctaccaccccctcccttacagtaacccccaccccttcaggatcagtcaagggaaagcactagaacccctgggtagggaaagaaaggagggaaaaaccataaaaggaatacttataatgtgaaggtttgtaaatagtccatgatgatgtcgtggcagagtctgatttctatatagaggtgactttttttttaagtactgtgcaagctctgtgcttctataatgtgggaaatggcttggggaggatggcccctagcttaggaagactgttgtgttatttgttcaatttcaataaaatgatttgtagatcctgcacatgagagtggcatcctgtgggggctctgacacccagtgtctagactaccacctgggttcaataggtaggcctggcacaggactctggcaggccccctatgaccagcaaagcccaagagtaagtctgagcccagcctgtggccatcccaactgtggccagcaggtggctgtgtgttcacacagacctcactgcaggccccctgcagggtgggagggcactcatttatctgttgtgatccatgtggtggtgacccttggaatcagaaggccctgggatacttcactaaggattggccccacctgcctgatctaaggtgagagagtgtgacccaagatagttctggaatatctgtcttagctgtagcatcgccagctgatcctaagtggggtcatggcctgacccccatggacctcaaaggcccagctttaatggacagcagccagataggtgtccccacgcctttggcctactgccaggctcagcaacccaaactcatgtgcctcctctgaggcctgcctgcggacaccatgggagaatgagctcaggctgctgtttcagcaagcaaggctcggcccactagtattgcccctgctgtctgttgcccccatcttctcatcacctgcagcctgcccactgtggtcattctgcctgcacttctcaggggctgctataaggcagattctctactaggcttaggctttgactatcagtccaactcccagttaaagaggggagatttcagggacaggcttctgagtgtagggagctggtctgccagtctttcggaggtttgaacttgtcaaggctagggcaggatcaccatatccagcctggacttgcagttctgtggggtgcctccccatacccccataagatgccaaacatgaggccctgtcatcctccatggtccccctctactggctgttcaaggcccagggctctcccatgccagatagcatcctgtctcctaccaccactgtcccagcctgagggaactccctgtgctgggcctacccagctgaccccatcgctggaaacaatgggggtcaggcaacacttccccactctctcccgccgggctgtgctcacttccttcctgctggctgcctgaggaagtgtccctgccctgggacagtctggcctagcctttgtttccccgggggtccccacccatggagctttcaaggcttctggcccctgtgaagccagcacagtggtacagggacactgcaccttcccctaccatgtcttggactccttggtcctcagggccagactcctgggtattcacctacccctcacacagccttctgttgggggagaggctcctgggcattgggccattgggttgttgaggggttggctctgggtgatttgagggtaggtagatttgcacccctggagaggtctgctggaaccttgctgcagtcctccctagggccagccacaggaacacccctcccagaggagtatacccctttcctcatccatgttgtaaggagccccctactctgtatagtggactctgaaatccatccaggaatgaactccagcaggaaagcactctgcagaaccctcccagtccatcccctcctccccaacccacacagtcacactcactaacacattgtcctgtcacacaggatgcggaagctctcagtggaaaaaaacggactcagctactggaagtccccccgaccctccccccaaggctagttcccttcttgggcacctgctctgggggaccatcagctgaacgacccccaagtattttgactcccaaaagcaccaccacctgaccccatcctctcacaccctactggatttgaggatgggccccaatcctagggaaggagtgaagaggttccctagtgttggaagctgtgggtgtgggggagattggcacctgatcctgagcccatagccttcctgtcacctggcgcagctggcggggccagatcctactcgggaagggtggggagggcagccagccagcagggcattctggagggaaacagggtcaaggcgatctcctcccccacgcctgttcctggccctttcctctcagggggcagcaggaagtgaggagaaagggctgggatgggaggcgggagcggatgggagggaatggggtttatcaagtcctcggcgagctgcccaacgggcagcagctggcgcaagtagcctagctggagaggctcaccccaggaaggagggaggccaccgacctactgggccgacggactcccacacaggtgagcccagagcagacggctggtctgcacccccacagatgcgctcgcagttgcactccctccctctcctggcgcccgggagggttaggggctggtggtgcagacgcgggcccttttgggagttgagtctcgcacaagggagcggacctaggaagagccgaggtggtttcgcacggggctcgccagggtctaagcctgccccccaccgggagaggcctgtggagcgtagggggcgctggatacgggatggaggccctgggagacccctcttgctggctttctcggaggtccagccagaaactgctgcaaggaatggaggcctcctcggggttgagagggagccgggctcccaaaggacctcagagactgggcagaaaaggacgggatctcagggatgactgtcccgccctgatgcgagtcagggagaggggcggccaacctcctagacccctctgagcttccctgaccccaaccctgcggccacgccgcgacccagagccgggctgccaggataacgactgcctcggcccttcctgggccggctaagaagcggtgcttggccccttccctcagtctggcagggggcggggcctccctttagacggcggaccagagaagggggcccctgattcgtgggaggcggggcactactctccaggagaccagaggtcgcctcaggtcaaagtccctttttccacacaaaggggacccacggctggcgtctacgttagggggtgcagagccagatctggtgctgccccctgccaacctcggagtaccacagcacctcctgatggccgaacggggcaacgcctcctcctattcccccccccccccttcccgtccccctgccttgtccctcacactgtctctttaaagggctggcggcgccgcggagctgggaggactgaaccaccggcctcgggctgcaggggaaacatttcaggctgactggcgctcgtggctgagactcccatagaaagcccggctcagaggggcattagggtcctaaatgggcggccacgtccctctgcagaggacctggggctcttcgagcccgaaacgaggcaccggcaccgagaaaggtggaccacaccttcccgccccgtccgcaagtccaatcccgggcccacctccgcactggagtcttaaagggccagcgtgcctgggggcggagccagcagaggcgctgagccgggccgcgcctgggcgaacggccggagcgggctgggctgggcccgggatggcggtggccctggcgccggtcccggtggcgccccgcgcgaggtgagggcgggcggtgcaaacctggcggctctctccccttgggctggggtctgaatccccgggggtgctcgcggagaggcgtcccagaaaccccacccccacccgaccgggcgcaggccccacgtgtggggcgggggcggggtcccgcacaaagacccggcggagcgcgctctagccctgagcggccgggcgggggaggcgagcgcgcgcattcccggtggcggtggagggaagggccgggcggccggcgccgccgtgggaggtccgctgcccctttgtccctacggggcctcctccaagccgggagagtgtcagcgctcgagagaaagtccggagagcctcactcttctgccgggcgagtgttacacggatagaagcctcccggcagcgttccttccagtttcgtagcctcttgacgagctgttccctgctttacccaaatgctgtcgtttctctggatcaagggttcttcacggtgtacagggtgggcatcagctgttcagggttctctgaaaccatgtactggatggtatgcaggcatatatgtgactctggtgagcccaaattatctagttcttagaagggtcacagacctaatagagatttgtgccgagccacaggctacctgctccagaaaagagccctgtgcttctggcagtgagttcccagggtgccttgtctgccctgcagtggcctgtggtctctcaaacctattacagccatgagcacagtgcccccacacagcatgggctttgggagcatagatgggcttgaggtgggcacttccagtattccctagactgacttgttctccccaacccttcttccagttcctgagctggtgccaggcaggtgacacctcctgcagcccccagcatgcgggcaggcccaggccccaccgttacattggccctggtgctggcggtggcatgggccatggagctcaagcccacagcaccacccatcttcactggccggccctttgtggtagcgtgggacgtgcccacacaggactgtggcccacgcctcaaggtgccactggacctgaatgcctttgatgtgcaggcctcacctaatgagggttttgtgaaccagaatattaccatcttctaccgcgaccgtctaggcctgtatccacgcttcgattctgccggaaggtctgtgcatggtggtgtgccacagaatgtcagcctttgggcacaccggaagatgctgcagaaacgtgtggagcactacattcggacacaggagtctgcggggctggcggtcatcgactgggaggactggcgacctgtgtgggtgcgcaactggcaggacaaagatgtgtatcgccggttatcacgccagctagtggccagtcgtcaccctgactggcctccagaccgcatagtcaaacaggcacaatatgagtttgagttcgcagcacagcagttcatgctggagacactgcgttatgtcaaggcagtgcggccccggcacctctggggcttctacctctttcctgactgctacaatcatgattatgtgcagaactgggagagctacacaggccgctgccctgatgttgaggtggcccgcaatgaccagctggcctggctgtgggctgagagcacggccctcttcccgtctgtctacctggacgagacacttgcttcctcccgccatggccgcaactttgtgagcttccgtgttcaggaggcccttcgtgtggctcgcacccaccatgccaaccatgcactcccagtctacgtcttcacacgacccacctacagccgcaggctcacggggcttagtgaggtatgtgtctccagggccctgccttttttctccttccttgaggatccactgcacatttgggttatcaggggccactataggactatacctgtagtttattggctgctccacatcccctcaaatcattctgtctataacctgaaagggtgacatcattatccccatttttcagatgagaacaattgaggcacagcgatgctgagaagtttgcccaaagcttcccagcaaatccagagcagagctgggactggggcccaggccttctaactttggaatccatcctgatagctgcacctaggctcaagtgtgcccttggcttgggaaactgagccccaaaagtggggtggaaatggacttaaatgtttaaaaaggaagcaaaacaaatgagcctctgcctggacgtgaaatgggggttgagctgggagttcagcaggttgaatcaggctggggtctgccctccttgtctgttcctgtcaccctgtggtctcagtcttccccagtgaccatcccttttcctgcatagatggacctcatctctaccattggcgagagtgcggccctgggcgcagctggtgtcatcctctggggtgacgcggggtacaccacaagcacggtaagcgagacccagcctgccagagctcagtctatgggacagacagagagttagggcctttggctaccaacctcaggtgggcaatcctagtctggtccccttgtctgtctcccacccgaggcatccctggtggcaacaggaggaggtcaccccggccctgctctcaggaaagaggaaatgctgtcctgaacagctgttgagttccgcccttccccatctgcccaactgggttccggtctgtacccccacccacttctcagcaggagcagggactgtgtggctcaggtgcagattgaatgtatgaatgtgtgcagttaaaataaggtatagtcatcacagtgtggacacagtttccatctgggcctgtgggctgaggcagctgaccctgacctgtggtccttgtcttctgcctccaggagacctgccagtacctcaaagattacctgacacggctgctggtcccctacgtggtcaatgtgtcctgggccacccaatattgcagccgggcccagtgccatggccatgggcgctgtgtgcgccgcaaccccagtgccagtaccttcctgcatctcagcaccaacagtttccgcctagtgcctggccatgcacctggtgaaccccagctgcgacctgtgggggagctcagttgggccgacattgaccacctgcagacacacttccgctgccagtgctacttgggctggagtggtgagcaatgccagtgggaccataggcaggcagctggaggtgccagcgaggcctgggctgggtcccacctcaccagtctgctggctctggcagccctggcctttacctggaccttgtaggggtctcctgcctagctgcctagcaagctggcctctaccacaagggctctcttaggcatgtaggaccctgcagggggtggacaaactggagtctggagtgggcagagcccccaggaagcccaggagggcatccataccagctcgcacccccctgttctaagggggaggggaagtccctgggaggccccttctctccctgccagaggggaaggagggtacagctgggctggggaggacctgaccctactcccttgccctagatagtttattattattattattttggggtctcttttgtaaattaaacataaaacaattgcttctctgcttggattttgtacctgggctaaagtgtatgcgagattccagaatttcccatggggtttgagctcagctctgtctctatgaaaccctctgctggggacttctcgtgtaagatgtattcaccaagacttgggggcccagagctgcccactctggagctgttctgctggggcaggagccaccccagtgggagtggagggacccacattccatcccaacaccaaggacgttgctttctccgtattggttgcaagggagtcaggccccgccttgtgtgagggacagggctcattgtgtttctgccacttgcccctgtcctcccagctggaccagtgccagcctccttgccaacccaagggagaaacgtttgatcttccctgctgttcccacaggcaagggtgtctcctccagtccctgctcccaagggcagtggacaccagccacatacacctctcatcagggtcacagccctccctcggatctggtggtgggaggtgggcaggggattgggatctgaatcgtgaggttcagtccctgtcccattctagagatgcctgatggggctgggaggtggcatcttgggcctgggagcaggaacatcttctaaggtctgctccgtcctggctgtgggagagtatggctagtctctggctgtccctgaggaaagaaggagcagctggagttgtcagaccagctctgagctgcttcactagccctgcctctgacgggagtgcattctgcctctcccctcagccagcaaccccacacctggggtcccgcccatgtccgtgatgactcaccacgcagccctgcttcaggaggctctggctctggggagacagactcaagaagccgttgagtggtgagggcagccagcagcaggggagcaggggtggtgcccttggagatgcttcccacattgggttctaaaaggtgagggcggcagctcgatgctcaggaacaaatcctgggcagaggctggaggaagttggaggtggtgaaggtgaacagttcagggctggggtgtggcttagtggctgctgtgggcagaggcaggaggggcagccctagagcagcaccaggcctgacttcacctaatactgacttactcattcagtaaacgctgagcacacagtgtgcctgtgctgggctaggtgctggggatgcatcgatgatgcatctatgaaccacaccaacaaagacccccgtccttgtgggagtgacaaaatagaggtagatgcacactagatgcaaagaccgagatgccagatgggagaaacaagcccggccaagccagtgccaacccaggctgtaaagatatccttccctcacctctttcgccggtgatgggtagagaatggagaggagagagtgaggtggtaacactggaaaggtgacgtggtaaattcacacagtgaaggaggaggtgcacatacaagtggaggggtcccaggtgctcatggccatggtggggggaggccaggctggagagaagattcaggtgttggtcaataaaatgatgggccgggtgcggtggctcacccctgtaatcccagcactttgggaggccaaggcaggtggatcacttgaggccaggagtttgagaccagcctggccaacatgctgaaaccctgtctctactaaaaatacaaaaattagctgggcatccgggcctggtggttcacgcctctaatcccagcactttgggaggccgaggcggacagatcacaaggtcaggaattagagaccagcctgaccaacgtggtgaaccccatctctactgaaaataaaaaattagccgggtatggtggtgcctgcttgtaatcccagctactcagaaggctgaggcaggagaatcgcttgaacccgggaggtggaggttgcagtgagccaagatcacaccactgcgctccagcctgggcgacagagtgagactctgtctcaaaaaaaaaaaaaaaaattagctgggtttgttggtgcacacctgtagtcctagctgcttgggcagctgaaacacaagaatcacttgaccccaggaggttgcagtgagcggagaatgggccactgaactccagcctgggtgacagagcaagactctgtctcaaaaaaaaagttgccacaataagatgatggcacttagcaaaaggacagcaggaaaggagaaaggagctgtggcctgtcccccatacctgtgacttcctgcacctgtgacctcccccacacagatgtgacccatgcatacctctgagctaccccacccacacccaacacacagaggtgatccagaccacaccactgtgacctttcccacctagctatgacccctacatacctgtaacccctcccatgtgtgaccccatacagctgttaccgtctccaaataactgactcctccgcaactgtgacctctcctgcatagctgtgaccagtacccatcgagctgtgaccccctccatataaacctttatgaacctcacatttcttcccccggaggacctaaaagatggtcctagggaaagtgcaactcagggagagccagcactgtcctgtggggaaagcggggagtgggtaggaataaggtaatggggagtgatgcggctcagagatctgaagtgttgaacaaccggagacagcaggcgggactggaccatcaagctgatggaccccagacatatgcgcacacacacaccatttgagccaatcctactggaccagcccagtaggagcaggcctgtgggcagggccctggggtggaggaggatttcaggcaccctcagcttcttcctatggttccaccattagagcttctcccttggactgaggccagctggagaatgctggcctggtggttacctggattgggccaactgcagcactaggtttctgggggcacca

SEQ ID NO: 185 - DNA, 1691 bp, Homo sapiens
tgcggccgcgtttccgtggagacagccgagcctgcggaaggcggcggcggcggcacctgcgatcagcggctggggcaggttatggtagtgcggactgcggtgtgagcagagcggccacggggcccgccatgcgccggcggccctgacatgggcgccagcgggtccaaagctcggggcctgtggcccttcgcctcggcggccggaggcggcggctcagaggcagcaggagctgagcaagctttggtgcggcctcggggccgagctgtgccccccttcgtattcacgcgccgcggctctatgttctatgatgaggatggggatctggctcacgagttctatgaggagacaatcgtcaccaagaacgggcagaagcgggccaagctgaggcgagtgcataagaatctgattcctcagggcatcgtgaagctggatcacccccgcatccacgtggatttccctgtgatcctctatgaggtgtgaccctgggaggtggcagacagaagcaccccctgccccggcaagaaactcccaggctcaatcaaggtgtggcttccattgaggagcccaggctggggccacaaccctgaataaactctgttggcccataaccttcagctgtgagcgggtcggtcccacagtattggttgggtgttggtttgtgtgtggacaagaggtggttggtgggtggtgaaggctaatggcagagttagcaccccactctcccaagccacccctgcaagcagcatagcagggcatataccagtcaggaatgcccgttacctggttccttgcctggtctgctttcttccaagtttgcctggggcctagccctgctagaggctacagcactttacaagcaaggtatgctttcttccagcccctaggctgtgggcactgtatacaagtaggaacttcctttccttcacttcccttttaacccctagtcagagcatttcagccgtttgctacctcgattcctcctgtgttggacagaggctgggggcagtgccagcctgattcttccgacctacctgccatttgttcccgccttcagatggatggacagtttgctggctattgataggagtggggactgggtgggggcttctccctctacccagggctgggctgatccccctactgcaactaactgttgccccccaaccccgaacccccagttgaggagttgagagagtgcaggctggggtcaggacaggctgcggatgcttgtgcctatggggagttactccaacccacctattctgtctaatctccatggctttgcaccaaatcctccacccctccaattgggaggggactgttcaccaccttgtggtaagggacaacaccctaaggctggtgccagtagttatgagtagcctaccaccccctcccttacagtaacccccaccccttcaggatcagtcaagggaaagcactagaacccctgggtagggaaagaaaggagggaaaaaccataaaaggaatacttataatgtgaaggtttgtaaatagtccatgatgatgtcgtggcagagtctgatttctatatagaggtgactttttttttaagtactgtgcaagctctgtgcttctataatgtgggaaatggcttggggaggatggcccctagcttaggaagactgttgtgttatttgttcaatttcaataaaatgatttgtagatcctgc

SEQ ID NO: 186 - DNA, 333 bp, Homo sapiens
atgggcgccagcgggtccaaagctcggggcctgtggcccttcgcctcggcggccggaggcggcggctcagaggcagcaggagctgagcaagctttggtgcggcctcggggccgagctgtgccccccttcgtattcacgcgccgcggctctatgttctatgatgaggatggggatctggctcacgagttctatgaggagacaatcgtcaccaagaacgggcagaagcgggccaagctgaggcgagtgcataagaatctgattcctcagggcatcgtgaagctggatcacccccgcatccacgtggatttccctgtgatcctctatgaggtgtga

SEQ ID NO: 187 - DNA, 24800 bp, Mus musculus
  misc_feature (7621)..(7653): "n" at positions 7621 through 7653 can be any base.
  misc_feature (10948)..(10967): "n" at positions 10948 through 10967 can be any base.
agcggtatcgagacaaaactacgcaggcgccaagctccctcgtttccatggcgacgacgactcaagcgcttcaacggcttggcaactgccctgtcccaagactttggtcctaccgctggactctgtagtcctaagtgtttcagttttccctattcgggttgcttcccaaaaccaaaggaatcttagcccctggcatgggtgacctggaactgctgctgcctggggaggctgaggtgctggtgcggggcctgcgcagcttccagcttcgggagatgggctctgaagggtgaggcagccgccacaggtggagtcactggtcttttagtggaggagcttggaactgacattggagaaggggttgccagtgtggaggggcctccaggtgggtaggcaaagctctctgagatagaagcgtatggcccccgtgcccctctggccccaggacaggatcatggtagtcttcagtaggatccaaccccaccctcactcccgttgcacatctggtcacccaatgtacatacatcccttcgggggcaggtggaataagcagcatgagagcctggagaagctgaacatgcaagccatccttgatgcaactatcagccaggctgagcccatccaggaactgctaatcaaccatgggaaggtacgtccaggtcccaggcaggattcctgccttctattgtacctcttggggacactaggcagcacctgttcttccttcaggcctggtacacctaagtgggaaagaaaaatatgtttgttttattttgagataaggtgttgatctgtagcccagatggccattagcctaactgtgtctgcctcccaagtgccggggctgcaggcatgcctcgctgtacctggctggctacatttcctattgtaccctcagtggatgcgagagtggatggagccatggatcctaggctccagggggagtgctcaagtgctgacatgagcctgaattgactgtaaggccaaagagatcctctctaaggaggaagtgaggctttccaaatggggaaggtagcacactaggagaaagtagaagccgggaaagatgcctggctggaggctgggccaagggcggccctagttctcctgcaagagaaaggcagagctgggtagcagggattggtctaggaacagggctcagtaaagggctgaagtaagagtaaggccaggtgacaaagaccagaataaggacaggaagagcagagctgccctaaagtggggtatccctggacggagggtggggtaaggtgcaagagggcaatggcagtaaaggccattcagaggaaacacaagagagttggagacttaagacaggctaaagctgggacaggaaagctgagggaccaaggcaggtccatttcacccctgcttctcccccgtcctccgcagatcccaacgctggtggaggagctgattgcggtggagatgtggaaacagaaggttttccctgtgctgtgccggctggaggacttcaagccccagaataccttccccatatacatggtggtgagctgggccctcagagtcctcagccgagaaagatagccagtccctgtctctccctctcagcccagccccgtcctcttcgacaggtacaccatgaggcctccatcatcaatctcctagagacagtgttcttccacaaggtgagacactactctgcaggcctgagcctggtgggctatgtcggccggggagggcatcgaaccccagaaatatcccctccctgaacccccccaggaggtgtgtgagtcagctgatgacaaggtcttggacctagtagactactgccaccgcaagctgatactgctagtggcccggaaaggcggtggtgacctgtctgaagaagaacagttccaggacagtacccctatgcaagtaagctacggtttcctggacttagcaaaatctcgatgtgagttctctccagcctccacaggcagggtgaatgctatgtgcctgtacccctacccccctctcccgcaccatcaggagctgcagaagcaggcggagatgatggaatttgagatctccctgaaagccctctccgtgcttcgctacatcacagactgcgtggataggtgggccaccctccaaggcccgggggcgagcacacaacaaggggctgtgtgtcctggcccatggcctctgctgaccacccttctaccctacctctagcctttccctgagcacactgaaccgcatgctcaggactcacaacttgccctgcctcttggtggaactgctggagcacagtccctggagccggcgggtaggaggtaaggctccccctcccatttgcctaagatgtaactggctgcttccagaacacccttcaggatcagtgtgaagggtacagggtacacatttaggattctgggatacctcacccgagatgggactagagtttgactctgaggcagacaagtcctgtgaaccatttgttgaagactccaccttgttctgacgtctggtggcccaggctttctaaccttgccaggcagtggtggacagtcctccggaccacacactctcaaagataacacaacacccaccggcatccagtgggctccttctcctcccccaggcaagctgcagcattttgagagtggccgatggcagacggtggccccctcagagcagcaaaagctgaataaactggatgggcaagtatggatcgccctgtacaatctactgctcagccctgaggcccgagcccgttactgccttacaagctttgccaagggacagctgcttaaggtggagaactcaatgaccccgcccagccccactgcccccctgcccagacccaccccccaggacatcctggcctgtccctgtcccctttcacaacttgggcttcaggcatcgacaggggagctggtaagatgcaaaccctccaaggacgctcagcccaacttcaggacttcctgtctcttggccctctggctaggaacagtttctcaatgtccttccctggatctcttgcagcttcaggccttcctcactgacacactactcgaccagttgcccaatcttgccgatctgaagggtttcctggcccacctgtccctggctgaaacccagccccctaagaaggacctagtgttagaacaggtaaggccctagaacatgcttgggagtgcttgggacggtggtccacttttccggctccttcctccctgtctccattacacttttttagatcccagaaatctgggatcgcctggagagagagaacaaagggaaatggcaggctatcgccaagcaccagcttcagcacgtattcagcctctcggagaaggatcttcgtcaacaagcacagaggtaaagtccactgagtggctgaagtcacgtgcataggaccaaggagggaaggtcacctagtgcttctgtgcacctacctgccaggtccgtccattcagctcttctcgactcctcccccaggtgggctgaaacctacaggctggatgtcctagaggcagtagctccggagaggccccgctgcggctactgcaacgcagaggcctccaagcgctgctccagatgccagaatgtgtggtattgctgcaggtgaggcgatcctgggaccttagttgcccccctaagctccaaccctgggttctcctacaagccctgtcattgtcatgcaacccaccccgctgcagggagtgtcaagtcaagcactgggagaagcacggaaagacatgtgttctagcagcccaaggtgacagagccaagtgaaggccgtagctgccgagggccgacagaagagcgcacccagactgtgactgagcttcagggactcgtggctcgcccctgtcagacctcaatttccctggtgagcacagctgagtcaagtagagctgcaaaccaccacactcttcacttcctgccccacccagcgaatacgcagaggaccaggccacagcatcagcaaactggcagacagggttggggggtgtaagcaagggccggatgtggagaccctcttcctttcgcacaataaagcagactcatgaaacgcaacagtgtggcgctgtacagtcatccttggggtcgggggagaagactggacggaaagattgggaaggggctctttgaaagggcccacccctgtgccgtgccccgcccacaagtccacacggtcggctcgcctaggtttccagcgcgtcctcctcggctctttcccgccgccctgcctggatcctgggggcggtgccgaagtcgcggcccgccctgcggcctcgcccgctcggtactcactagctgctagtccgctacagcaccggcctgaccgggccatgtcggcggagccagaactcattgaactacgcgagctggcaccgtccgggcgcatcggtccaggccgtacccggctggagcgtgccaacgctctgcgcatcgccccgggtacaacacgcaatccgtcacagcagcacgtcccgggtcgtggccaccgtttccagcctgcagggcccaccacgcacacgtggtgcgacctctgtggagacttcatctggggcgtcgtgcgcaagggcctacagtgcgcgcgtgagtaagcggccccacacagccagcgactacggaaagggaggcagcaccatagttgcgggtcaagcggcagtggagggctggtcagttgtgatgatcctgcagaccagatctcctggccttgctccatcagggagagtgcttgagaaaatggtttatcacttgtcacgctctgtccgtgccagttgggcagagttagttgtctgtgaataagaaggtgcttcaagtttgtctttaaagtgcttgtgccctttcttgaaaagcctttgtgcctgctgagctctgagcctacattccgaggcccgcctcttcccaacgattggctcactgtgttccccctctagattcctgggtgacgtctcccacattaatagggggccagaaaaagttagaaccttagttaggctccttgttagtaggaattctattgaaacttcagtcaaggttgttttgagtcaaggatgcagaggctaaaacatggagtccagccacacacacaatgagtggtccttctgacctaggaattaccagcaaacagaaccacgcaggacaatttataccttccagtctcctcgcgcctacttctcctctcagacttgttgactccgttgttgaaagtggaccttaggcatcctggtttttctgttttggtttggttttttggttgttttgttgtgttttaagacagggtttcactctgcagccctggcttgcctagaactctctatgcagaccaggctgtgacaagcaacccacctgcccctgcctcccaagttctgatgtatagttttgagttgagaatcggtgctttgggccatataggaacttaaaaatggcactgtaggcctgtgtgtgcctccagatcatctcatttactatacaagtatgtcacaaactcagctagtgtagcagtttgtgacagaatgccacatgagagcaagagctgcggcatctcagcattcacaaggagaaagaaagctgctctggggttcttgtctaggaagcaagacagtttgggagataaggaagaaaccaaaggcaaatggagggtttgcttcagattgggcttacagtgataacttgttgagataggaaccctggggtggagtgaagtggggaaaaaatgacattttggccatattcattagaaatcttcattagacattaatgtgaaggcactgcacataggatttggtctgaagaggccgatcagtgctgcctgggatctggatcaggtgagtgtagacagagctgggacagtacccaggtgagaaacctggacatcaactatgagacctgggcctttatagaactaaggagaggctgctggcaagagccgcagaggagtgagaaggaagcctggccagtgggtgctgcccctgggagtcaggaggagcaagcaggaactgaaggatttaacaatccagataatgggtacagaagtcaaaacgttagacatgtccactggacattgtggctcgtggacaataatcctaacactggagctgttggaggcaggaggatcaccaagttcaaggttaccatttggggctaacctgaactctatgagattctttctcaaaaaccaaaatagacttgtgtaaacaagtggagactaataggtttttttcggccgaagaagtaagccaattcaagcggaattgagagtatgaaaggaggtttattgggggcggcaggttcaccgatcccaaggaaggaggctagggaagtcgccatgcagacagggtaagagggaggatgtgtacgcaaggagaaagaaatgcagagacagaaaaagagacagaggaggggaacgaggacaaaatgtctggattatataggtaagagcctttgggggaggggaagcccagttctggtatgccagctatatcctgcaagaggtgtgggctaagggatgctcggggaatctggaggccaggtctgctttgatgcgttacatatgcacctctgcagctcgtctgaaacccaacaacaggggcagaggacaaatacaggaagtcgtaaattaaatgcctttgttttcaagttaatggcaaagctaagtaatagctcggcacaagtgttaagcatgcttggatccctaaccgcctgaggcctcccagcaagtgtccagaggtgcctaaccgaggcctctgggatcgggatagcagtgggcggtaaccggctggagaaaaggccagtgagccccaaaacctgttaacagaggctccctcattcagtgggtcacttcgccgagctcccccgcctcacggccagccctttctgcagactgcaagttcacctgccattaccgttgtcgcgcgctcgtctgcttggactgctgcgggccccgagacctgggctgggactctgcactagagcgggatacgaacgtggtgagcgcggggtcgggggagggcgggccgggagggaagccgggactcggcggaggtgtgcagggttaatccctacgccgtgcataatgaacaccccagtgatcaatttcccggcatcagagatgctagtttcgctggcgggtttgtcaggcgaaggcgctccctggctgggagcacgcgcacctctcacaccccgcttccggccctaagggcagcggcggtgcacatgcgcacacgccccggcccgctgggaggcgggacctgagaggcggagccgagtggagatgcctctgcgatgaggtcatccgtcgagctgtagcgtcgtggccccgcccctcgacgtcttcaccccctcacccacctcgacaccagagctaaagtcgggctgtctaggtttcagtcctaacggttgccgcgcggcgctggcctccgcgcaagcgcgacctgacacgctcacacgcacgcacgcacgcacgcgcccgaggcggtggttagaggctctccacgcagtggactagggatcgggcgggtaaggcgatgggcgaggctgaaacaccttccttcgaaatgacctggagcagcacaaccagcagtggctactgcagccaggaggactcggactcggagctcgagcagtacttcacggcgcgtannnnnnnnnnnnnnnnnnnnnnnnnnnnnnnnncccgagtagaagcccagttccagcgcgatggtactgaggacccagggctacccctgcccttgcagtcacagaccggttgagccagggggaatcaactctgaagcttgaagggtggaccacaggcgggcgtttttcacccatgactaaagccagcctcgcaatccaaaccggcgtcttgatttcgcatttgggcgctcccactccctccctgggggaaatgaggaagtggaggaggagtccaccgggaagtgagaagttagtttgggaggggactctggccgtgccgtatgcggtcttggatcagccagcaaagtgcccagccgttgctcgaccaactctttgacaccagctgctggactcgatctttctttcctccatggtggaactgtgcagagggatttggggaattcaggaagagggccttaaaagactattaaaaaaaaaaaagtgtggtaccagggcagctgaacctctttaaaaagtctagatgtgcccaaattatccgactttctgggaatatcatagttgtggccaccaagctcggataacttgttctggagcgggaatccctcggaacagcacagaggccagcgaatcaggaaagtgaggacggagactgaggttagaaaacttagtagcactgaactagaactccttatttgagccaagaaagtggaattgtctgtgatgctgtaggtgagatttgatataaatttcctacaggtggactgctacttgacacctccaaaaccttagtccagactttagactcaatgtggggtgggagtgggggcgggagggtgtctctgggattgtctccataccactcaacctgagtcatcttctattatggagaggtgggggaaaatataagatactggccagttgaaaggcatacaaagagaagaattgtttaaaagcagctgaagtttatagctgacttagctgtagagtgcttagcattatatgtgtgatggatggcctgacttccaaccattaaggaaccaaaaaataagaaagaagaaaaggaagctaagaagtcccaaagagcagagtaaaagcctgagggctggggctgggctgcaggttcaatccccaacccagaccctcctagaattctcctgggaccaggcactgcctagcggtgatcccagctgtgtttgttccaattgcattccaatttagggcctttctgaaaccaacaggaagtaagactcacactgggagttgaggactgactgctcttccagaggtcctgagttcaattcccaggaaccacatggtggctcacaaccatctgtaataggatctgatgccctcttctgatgcatcagaaaacagctacagtgtattcacacatatataagtaaataaatcttaaaaaacaaaaacaaaccaggaagtaagactcaggcagttaggtcaagtgagtcctggctgccctgagcagcagggtgactccaccctcccgcagttcctgaagaaccttgtctctgggctaagtcttcagacagcgagggggaagaacagaagcctccctgcttgctgctggtaggacaggctctgctgggaaattgcctgtacacctctggcagatgagaacctgaattgaagctgccttctgtgtagcttgagtcagagggtaaatggtatgtcccagtgttacttcactatataagatgtggtgtggctggtcccaagaaacccactaaggcatcttacattatagagatcagctttcctctcctgtctactgtagttagactgctgatgcaccagctcccgtgctgcctaccctctcgggggtcatgttctgtgctgccgcacagtgggagagtgggctttcttctccagaacaaactgaccaaactagtgttctgggttcagctctacagtggagatgtgattgagatggggttttaatttttgtatgtggtgggggtggaaatcgaagggccttgtacattctgggaaattactctatcactgagctacattttatcccccaaagtgtttatactttaaacaagatttttcccttacagtccttcatggtttcctggcccctggacatgtgccttcatttatctgtttctgtgatgtcgttaggggccacaaccagtgctgaggtggccccagatagcagaaagccaaacggattctacctgtccttgctctctccatctatagcatgtaaaaccaggagcaatgatggcttcaggatgtatgggtttggtgacaggaccaaaatcaagttccaagccagaaggaccatccccatccccaccccacccaccaaagagccttggccttttcaagggccctgtatctatgctggcctgtctttcaggatgaggctgtagagcgggagacacccgatctttctcaagctgagactgagcagaaaatcaaggactacaatggccagatcaacagcaacctcttcatgagcctggtgagttggctgttcaggaatgtgggagaacagaagcccagctctgggccagatgtccagagagtcagagcaaagtattctggggtgtacccaagcagctatctgtgcagacctggctttaccctgcccctggacgactcaacctaactcttccatctccagtagaacttcctgacatggcatggttctccttttcctttctttcttttcagaataaggatggctcctacacaggcttcatcaaggttcagctgaaactagtgcgtcctgtttcagtgccttccagcaagaaaccaccttccttacaggatgcccggagaggtacggggcggagcacagccgtgaagcgccgcacctctttttacttgcctaaggatgctattaagcatctgcatgttctatcacgaacacgggcacgtgaggtcattgaggccctgcttcgaaaattcatggtcgtagatgatcctcgcaagtttgcactctttgagcgaactgaacggcatggccaaggtaggtttccagtctcagcactccctgtgtaagggttatagatcacatacctgtgtattaaggggctgaggcatctgagtctgtctttgtttattttcccccgcccaacctccagtatacctccggaagctgtcggatgacgagcagcccttgaagctgcggcttcttgcagggcccagtgaaaaagccctgagctttgtcctgaaggaaaatgactcgggagaggtgaacgtgagtccgtagtccttcttacttactttcttactttcttatcactaacaaagctagtgggggtgtagccatggtgaggatttcagggagaaaccgggnnnnnnnnnnnnnnnnnnnncacagcctgtccaagaatacacaggtcctctaatggaagtttaggcttccaggactctttgttttgttttgttttttgaaacagggtttctctgtatagccctggctgttctggaactcactttgtagaccagaatggcctcgaactcagaaatcctgcctgcctttgcctcccaagtgctaggattaaaggcgtgcgctacctctgccaaacagcttctgggactcttaagccaaggtctagagcctatcccaagaaactataggaagaagctgaatctagtggttcatgttataatcactgtactggggaggctgaaactggaggattgttacgagtttgagatcagtctggactaccaaaacaaacaaacaaaaacaaaaaacacacaagctaggaagaattgtcttcaggctttgttgtttcctggtgttgaaaatgagaacttgactaactcatagtgagccaagaccagttcagagctccatatatatgggctcagagatggctccacagtgcagaggatccacattctgtttgaagcactcatatcaagtggctcccactcacctgcaactccagcgccaaaggatttgtcttcctctgctggcatcagagggtgcctggagttatgtgcctgtgaccccacgcgcatgcgcaagcacacaactaggacaataggaaagatggctcagtggttaaaaacatgtattgttcatgcagaggacctggatttggttcttagacgcatgtaaaagcttacagttgcccataattgcagaccatacacacaatgtgcatacctgcgtgcaagcaacacacttatacacataaaacagattttttttaaagactttgtgtatgaatgttttgcctgcatgtatatatgtgtacacgtgcccacagaagtaagaagaaggtgttggctctcctagaacagagttacagatgatggaacccaccatgttggtctaggaattgaactctggtcctcttcaagagcaaccaatgctcttaaccactgaactatctttcgagcccctgaaacaaaccttaaaacaaaaagaaaaagaaaagagctttgcaggtataacctgaaaaacataaaggcctcttggaagcattgagacggtctgccagctaggacagatggcacaggcctataatctcatctacttgggaagctaaagcaggaggattgcctcaagttcaagactaggctggcctgtatagcaagatcctatctcacaaacaaacaaaccactcttcctagcaaggcctagggacagtggcttatactctcaactacttggaatgctaaagtgggaggatcactagttcaaagccttcctgggctacagagtgacttaaagggcaatctacgctaacttaatgagatcctgtctcaaaagtaaaaaggcttgggactgtagttcagtggtaaagtgttgagcaagcttagccctttgttcatgtcttagttaggtcttctattgctttgatgaaacactatgaccaaaaccaagttggtggggaaaaggtttatttatttggattacagttccatatgataatccatcattgaaggaagtcagggcaggaactcaaacaggacaggaacctgaaggcaggagctgaagtggaagccatggtgggcgctgcttactggcttgctcagcctgctttcttatagaactcatgaccaccagcccaggggtggcaccatacacaatgggctaggccctcccctatcagtcactcattaagaaaatgccttaaagctatagcttgtggaggcattgttttcaattaatagagaattaatattccctattttcagataactttaacttgtgtcaagttagccgaaaactagatagcacagtgcaatttccagtaatgtaaaaagaaagaaaaaaaaggacaatgactttttacatcggggttagttgtggcttagtggtaagaatagacgctcagcatgcacagagctcggcagcaaaaaaaagaaaagaaaaagaatagggtgggtacaagggctgtatgggaatgtagcttggtaaaaggtaatttgctaacatttatgagaccctaggtttgaatcagagcccattatattgagggagagaatatgagactatgcgggagaatacacctaacaacagatagagatatttcactacaaggagactgttttgtaggatctgttttctatacagactgctcatgaggatcctagcacagaccatttagtgaaaagcctaacaccaaggctagcattgtgataaatacttgtaatctcagcgttccggaagcagaagcaggagaatcacaagtttgagactagcctgggctacatagcaagttaaaggccaacctttgatatgtagaaagactatgactcaaaaaaacaacaaaaaaaaataggggacttaaagagttggcttagcagggctggagagatgggtcaacgattaagagtaccggctgctcttctgaaggacccgggttcaatacctggggttcagttcccaatacccacatggcagctcacaactgtctgtaattccagttccaggggatctgatgccctcacagtcttacatgcaggcagaataccaatgcacataaataaattataaaaccattaaacaacaacaaaaggagttggcttagtggttaagagtacatgttgttcttacagaggacatgggtttgatgcctagcacccagatggcagctcacaaccatctgtaactcttaattctgggggatctgataccttcttctgacctctatgtggaaacatgcatacacataagataataatgaaatgaaaaggaggtaatgtcaggagcgcagacctgctcatgggagaaccatcatggaccagtcttggaggagggtctgccaacttagctattcattgctgcagcccgtgtatctctcctctgccctttccagtgggatgccttcagcatgcctgaactgcacaatttcctacgaatcctgcagcgggaagaagaggaacaccttcgccagatcctgcagaagtattctcgttgtcgccagaagatccaggaggctctgcacgcctgtcctttggggtgaccttgggtctccatggatgacaggaggagaacaggcagtgcaaagagcgtgccgtgtgagtgtgacagggcctgtggggcctgaggagtgcgtgtgcatggaggtcctcctctgctgaccgggatgagcccagagaacagggaaagagccagccgtctacctgtggatatagtggggcggggctttgcatccctctgcccgtatgtactgggtcatactctgcgtagctgctcaagtcacagggtcgcagctgtgagaatcttagagactctacagacagaacaaggttatattttcacgggtaagagaccttacctatggaggaagattgttttgagtcatgaatgggtctcaggatagccctatcagagccaagggtagctgctcagaataatacaagcaattaaggtagagtctggggttccctcttaccgtgccttctgacttccaaacaaacaccctggggtcagagagggctggccagtacaacaactacagtggctcagtcagtgcctcctctaagggaaaggttgctggaccagaccctcttcttgtttgccaaagccagagtctccctcagatatttttgatggaagtgtatgaatgtatgtaatgttttgtggcctcaactgaatgcctcctgtggggaagggatgggggtgtgacagtcatcatcagggcctgatgcctgagagaattggctgaataaagatgtaagaatttttctggttttggactctatagatgtgggcccccagtcggggtaacacctaatgaaagactgccaacaaagattgacacatccagagtgcaccctctccaaggtcgcagtgggaccaatatgttcaggaaatgtatgcctgtggattcaggtgtctttcaaccctccagggctcaggtcatgaagagacaagaataagctacagttactacacaggaaacttttttctccaggccaactcagagaaaccatagcagtaaccccttctccaaaaaactactcgtgggtcccacacttcacatgctaccaggggaaagctggtaataattattttcctgaagaatgttctctggtgaacttacaacacttagtttaagttccttcagacctcaaatatactcttaagaaattgatcaaaaaagttttaaaaagaagtttggctccctgtgcggttggtcactcctttaatcccagtattcgggagacaggcatttgagcgtcagccatttatacatggcaagtgccaggccagctaaggctacatagtgagaccctgtctccaaaagaaaaaagaaaacaaaaacattaagcaagatccgtagtttctttacaggcaaatgtgacaactgcaaagacacagttgtgaaaacagccaaccttagcctcagacaggcctaaggtcccttaggggtggaggggtgaccctaattgactattgctactgggccggagttttgggcgtgtcagggacgtagagacaactataccgggtccgaccttaaagtcaacaacaacacattacctccgcctttctggaagggagctgtcccagctgacccttgggacccataggcttctgggacctggaggcagcgcatccctgtggtggtcagcctctgagagtggccattggttctacaccacagactgacgagacctttagccactcagaggaggcaccgtgcaggacgcgcggaagcggaagtgaggtttccgtggagacagcagagcctgcggaaggcggcggcggcggcacctgcgagtggaagctggggcagggcatggtcgcgcccgccgcgctgtgagagcggagcggccgctgggtccgccatgcgcccgcggcgctgacatgggcgccagcggctccaaagctcggggcctctggccctttgcctccactccggggggcggcggcccagaggcggcaggctccgagcagtctctggtgcggtctcgagcccgagcagtgcctcccttcgtattcacgcgccgcgggtaagggcatgggtatctgcctttgggaggacatccgggaatgagaaacgcccccctacatttgaatcagacgactgtcatattttgggtcccagtcaaagcaaggagaagggaaaaccaagcggcgttcagctcttgaccgcccagatggtctttttagagaattgcctgaggttcgtctcttagggagcagctccataattcagctaagacggcatctaagagtcttaaaacctccctttcatccaactcagcctgcaaattaaaggcatttatgtcccttctgttcttctaagccttagaagaaatctaagggaagatgaccttctgtttaggtgtcttgccttcctcactgtgaagttggacctccgagaatagtgtctggaaaagcagagaaaggcgtcagtgttgaaggtggggccacaacaaaaaaagtgccctcaaccagttgggttctctagatctggaacactaacctaaccttcttttttcccaggtgctcacacaaaatggcctggacctagtgagctcctagggactggcattccctgtgatggaaatttgaccgtaaataccagagagacccaacagtgtcgattagacagtgccagccactggggaatgacttggagtgcagccttctgggctcagacatccaccatcttggtctttggccctggaccagcagtgtctttagaagtgagaccagtatgcccaggccactaccccacccactccataaataagccctaggtgaagggcctgctactagaatcatgacctttgtgaaacagaccagtggtgaggactaactttagttgcctagagagggtgctctgatgtgacatcctgttggtatgacagggcaacagtggccttgtcacactgcctgcttccctccgggcaccaagcaaagagttcttccacggagattaccgttgtgcgtcttctcttggggttcagcgtacttccctgtggtctgtggcccttgccaaggccagggatgaggctccaatccagcctgttccccttctctccacagctccatgttctacgatgaagatggagatctggctcacgaattctatgaggagacaatcgtcaccaagaatgggcagaagcgagccaagctgaggcgggtacataagaatctgattcctcaggtgagggtccgagcagtgatcataaagcctacatcagtatgtcaacggagatacagatggggctttctgggggaagagctgggaagaacagagaggctcttagcatagaggcccagagctgatcttcactagcctctgtttccatggcagggcatcgtgaagctggatcctccccgaatccacgtggatttccccgtgatcctctatgaagtatgaacctgtgtgtggcatggcagacacgagcacccactgccccagcaagaaactcccaggatcaaggtgtagcttccattcaggagtccaggctggtgccacaaccttgaataaactaaactccgttggcccagaaccttcagttgtaagaggggttgtccctcagtgttaactggtattggcggatgtctgaacaataagaggttggtggctggtgagggctaaggacagaattaccagcccgtctcccccagccgcttgtgggagaagcatgacaggagacacgtgccggtcaggaatgcctggttcctggttacctgcctgacctgctttcttccaagcttgcctagggcccagccctcctagaagctacagcactttacaagcagagtctgccttcttccagcccctgggctgtaggggctctacccaagtgggaacttccttttccctcactccccttcccccctagtcagagcatttcagccgtttgctacctcgattcctcctgtatcggacagactggagatacataccagcctcacccttcctgcctacctaccacatgctcccgctcttaagctggacactttgctggctgttcaataagaatgaggaccagtgtgggaggcttctcctttcacccagggctggactgatctctcttgatttcaaccagttgccctcaagttgagagggtacaggccggggtcaggacaggctactgacgcctgtacctgtggggacttgccccaaaccacatattcgtcgtctcccttgtctttgcaccagtcccacaaatccccagttgtaggggagaggcagtccaccacctagtggtaagaaacgactggggctggtgccagtagctatgaggagcccatccccccccttctccttacagtatctttaccccttcagggtctgttaagagaaagtactggagctccttggtaaggatagaaaggaggggaaaatacataagaggcataattaaaatgtgaaggtttgtaaatagtctagactatgataatgttggggcagagtctgatttctatacagagatggctttaaaaaaaatacttccttgtggaagctctgtgcttctagagtgtgggaaatggcttgggacgagtgatccccagcacaggaaggctgttgtgttatttgttcaatttcaataaaagttatttgtagaccctgcacacgagagtggcgtccagtgagactttaacatccagtttctagactgctgatccggtaaggctagcaaacccttgcctgaacattgcctgtagcaataccagccgtggccaacaggtggctgtgtccaagaactgtctccagccctctcaagacgcagagggccactcacctgtccattctgtctgggaatttggaaacagaaggtcgtgtgggatcctagggagattgccctagtctgaggtgtgagtgtagccacacacacagttgtgagatggttctggtcccaacaataccagattatgtgaagtgaggttacagcctaaaccccacagatcaaggcctacctatacttgaacaacagacacttcccaccatggccttggcctccttccaggctctgaagtccacactcacctgacttcccaaggcagccatcagaaaggagagcacaggcttctgctgcagcctctattgtagggctcggcccaacacctcctcagctctctgccgccaatggacattctgcctacgtttctcaaggtcggctatgagcaggttctctgctcgcctagcctttggccataataaactcaagacgtttttaaaaagcaaaagcaaaacaaacaaacaaaaaaaaaaaccaattgggaagcaggagtttatcaactcagggcagttggccttcaagttgctcaaagctggaactggtcaagtcttagcctgttcaacatagatttgcggttctgtagaccaactgtcatccctgtaaaaagccaggagttaggttcctgtccaggagccaaggctccccatatcaggcagtatcctatctcaccaccaccatcctgctcgggaaactccctgtcctggacctgcctagctaaccccaaagctatgaacaataggagagtcagggcagtgtttccctactccatccggctgggctaggctcacttccttcctgctggcagcctaaggaagtgtccctgccctggacagtctcgcctggcctttgttttcccagtagtccccacccttggagcttcctagatttttgtcccttgtgaagccaacacaatggtgaccacagcctaggctatacacccagctctcctgctttctattggcagagggactccctagcactggggaggtgagccccttggaccaggtgaggggttgtcagtttaggtagatttgaggtcaggcaaatttgcctggacctccaaagaggtcttccaggaattcctattgtaagtttcctctcccatagggacacaattctccccccaccccatatcacacagccacaggcatcaacacattgtcatattgtctttgtcacaggttggatacttccgctctcaatggaaaaaaaaaactgactcagctactggaagagcccaccacccccaccccacccgttttcccctcgtgcaggatggtttcttctttggcacctgctctaggggaccattcgctcaaccacccagcaaattgactcccatgaatacagccagccacttgggccccctcacaccctactggatttgaggatgatgcaaaacttggagaaagatgagcccttggttcctaggcccatatccttcccatcacctggcacaactcatgcagaccttcctgggaggaagggtgcaaagggcagccagccaccaagggaaacagggtcaaggggctctcctccccgcccccctggccctttccgcctggagggcagcaggaagtgaggagaaagagcagggatgggaggcgggagggagtgggtgggaaggaatggggtttatcaaatccccagcagactgcccagagggcagcagctggcgcaaggaacctggctggagagactctactcaggtgagcgcagagtagtacataaagctagtccgcactgccataaatgcgtgtactcctgcggcgctccctagcttccaagcttgcggtagggaaaggggctggcggccagaagcggactttcggagatttgagtcgtgcattggagagcagatctaagaggcgagggtacaggtctaaacctagtcctcactggaaggggattgcaaggcagaaaggttcagaatatggagtcggggtactagggagacactgaagcctcctttctacgaagtcaggcccgaaactttggcaaattgctctttatttggagttgagtgggtacccctatggacaaccatcccaccttcacctcgtcgcagagactggtctggggagaatccagtaaattggcaagccctggcgtggatccggtgaaagtggctagatcactttcccctttggcccgactgaacttcaatccctttggcaaggcagcgacccacccccctggttaccaggacaaccactacgtctgctttgccaaaggagggctcagaagctgtactaggccccctcctctagacgagcaaaaggcggggtttccttctgaccgcagacagactagtggagggaacctgggctcagcgaaggcgggtcattaatgttccaagaggttctggatccactcgtgtcaaaatctcttacactagacaaagggcccactttgctagagtccatattcagacaggtgggattgaatccgcagctacccccagtcaaggcttcagctataagcttttatttcaaatgccattaccaccactacaccctcattccgctcgcgcccgccccatccaatgttctatccctttaagaggccagctgcaaagagtggattgttccactgacgacagattgtgggggtaatatctcaggctggttagctctggtggctaaaaccagcgggaatccccattccaggaggtattcaatctcagatacataactatgttcctctacagaagatctaagggtcctcgaactcgaaacgcagcactggcaaaaaggaagagaaacacaccctccctacgaggccgtaaattctgccatccacccacctccgaggcaggattcttaaagggcccgcgggcctcggggcggagccaacagaggctcgagctggggcagtgcttgggcgaagggccggatcgggcttggttggtaccaggatggcggcggccctggcgtgggtcctggtggcgcctggttcgaggtgagggcgggcgtcgcaagcctggtgactctcttcctgtgagatgggctctgaatctctaggggcgccctcataagtgacccaggaaccccacccccacccggctgaactctggccccacgtgcggggcgggggcggggtcccgcacaaagaccggagtggaatactctttacccgggaccccttgtgctgggaggtgagggtgtgggccggtcgcgaagtgctcacacagattcttggtggctgtggtgggaagggcaggtcggcgagcaccgcggtgggaagtccgctgcccctttgtccccggggcgcctcctcctatcctaagagtgtcggtgcccgagactaagtcctgacgttcttgctcttctgcttggcgcacattgcacagatagcagttcctctgcagtgtacctaacagcttcccagcttctgtatgcgttgtgccccaaatgctgtctcttctcagaatcaattctgagttcgtaatgagggtgggggacatggggtgttcagagtgttttaaaactatttactgtatggtatacaggcatgtaagtgactctagcagtgagtcggtagcctaatcagtccctttttcagaaaggatatggacctaaaggagattcttgcccaaccacgggcagctccctgctctagaaagagctctgtggtttcggtaaattccctaaggtcttttgcctacccatcagcatcctgctatctcccaaacctgttacagcctcggccatctgagcaggagcatggtgtgccgcacagtatgggtttggggagtttatgtgggatgaaggtgcgtacacatctctggaatttgctagactgacttgttctctctcacactttcttcagttcctgagctgctaccaggcaggtaacacttcctgtagcccccagcatgcgggcaggactaggtcccatcatcacactggccctagtgctggaggtagcatgggccggggagcttaagcccacagcgccgcccatcttcactggccgaccctttgtggtagcatggaacgtgcccacacaagaatgtgccccacgccacaaagtgccactggaccttagggccttcgatgtgaaggctacaccgaatgagggttttttcaaccagaatatcaccaccttctactacgaccgtctaggcctgtatccacgttttgatgcagccgggacatctgtgcatggcggtgtgcctcagaacggcagcctctgtgcacacctgcccatgctgaaggaatctgtggaacgctacatccagacccaggagcctggggggctggcagtcattgactgggaggaatggcggcctgtatgggttcgaaactggcaggagaaagatgtttaccgacagtcttcacgccagctggtggccagtcggcaccctgactggccatcagacagagtaatgaagcaggcccagtacgagtttgagttcgccgctcggcagttcatgttgaacactctccgttacgtcaaggcagtcagaccccagcacctgtggggcttctacctctttcctgactgctacaatcacgattatgtacagaactgggagagctacacgggccgctgtcccgatgtggaggtggcacggaacgaccagctggcctggctctgggctgagagcacggctctctttccctctgtgtacctggacgagacactggcgtcctccgtacacagccgcaactttgtcagtttccgtgttcgggaggcccttcgagtggctcacacccaccatgccaaccacgccctccccgtgtacgtctttacgcgtcccacatacacccgaggactcacggggctgagccaggtacgtgttctcccttcctctgggagccactgcatgcttgtgttatcggggaccagaagtactattccatatctgttttagtcttgtggaagggtgatgtcacccccattctgtagataagaccgaggcccagagatgctgagaggtagccaggagcctgtagcaagtccgtgaaaagtgcacagaactaaaccaggcatcctgactttggggtcagaatgtgtaacctttgactttgtgggctcatgcgtgggctcttggccttggagactaaggtccaaggtgaggatagaaatgggcagagcggcctctgcctgtctagaactgtcctaaggtcagcaggttagagcaggtctgttctgagtctcctgcgacaccgtctggtgccagtcttgctcaggaaccatccctccccacacaggtggaccttatctctaccatcggtgagagtgccgccctgggctcagctggcgtcatcttctggggcgactcggaagacgcttcaagtatggtaagggagacccacctggccttccagggctgatgaagagtgtatactttggcttctgccccccacctgggtgtacacactgagtatagcttatctcctaagcatagcagctttgtccctggacccaagagggaagaagggcacccccaccctgttcccaggaagaggaaatgctatcttgaacagctggagttccgcccttcctcatccacacagctgggctccagtctgtctcaaccccgcttctcactagggacaggggactgactataaaggctcgggaactctgtgtatatgtttacatacatatgcaaataaatatgccagggatgtgcctcagtagagtgcttgcctagtctagggttcaaactccaccactaccaaaagaaagaggcgctatcaccacagtttccgtcggggcttgggcaaaggtagctaacatcagacactcactccttaaccttggccttttccaggagacctgccaatacctcaagaattacctaactcagctgctggttccctacgtagtcaacgtgtcctgggccacccagtattgcagttggacccagtgccatggccatgggcgatgtgtgcgccgcaaccccagcgccaataccttcctgcacctcaatgccagcagcttccgcctagtgcctggccataccc

SEQ ID NO: 188 - DNA, 1564 bp, Mus musculus
ggcacgagggggatcgggcgggtaaggcgatgggcgaggctgaaacaccttccttcgaaatgacctggagcagcacaaccagcagtggctactgcagccaggaggactcggactcggagctcgagcagtacttcacggcgcgtacctcgctggttcgcagaccgcgtcgggaccaggatgaggctgtagagcgggagacacccgatctttctcaagctgagactgagcagaaaatcaaggactacaatggccagatcaacagcaacctcttcatgagcctgaataaggatggctcctacacaggcttcatcaaggttcagctgaaactagtgcgtcctgtttcagtgccttccagcaagaaaccaccttccttacaggatgcccggagaggtacggggcggagcacagccgtgaagcgccgcacctctttttacttgcctaaggatgctattaagcatctgcatgttctatcacgaacacgggcacgtgaggtcattgaggccctgcttcgaaaattcatggtcgtagatgatcctcgcaagtttgcactctttgagcgaactgaacggcatggccaagtatacctccggaagctgtcggatgacgagcagcccttgaagctgcggcttcttgcagggcccagtgaaaaagccctgagctttgtcctgaaggaaaatgactcgggagaggtgaactgggatgccttcagcatgcctgaactgcacaatttcctacgaatcctgcagcgggaagaagaggaacaccttcgccagatcctgcagaagtattctcgttgtcgccagaagatccaggaggctctgcacgcctgtcctttggggtgaccttgggtctccatggatgacaggaggagaacaggcagtgcaaagagcgtgccgtgtgagtgtgacagggcctgtggggcctgaggagtgcgtgtgcatggaggtcctcctctgctgaccgggatgagcccagagaacagggaaagagccagccgtctacctgtggatatagtggggcggggctttgcatccctctgcccgtatgtactgggtcatactctgcgtagctgctcaagtcacagggtcgcagctgtgagaatcttagagactctacagacagaacaaggttatattttcacgggtaagagaccttacctatggaggaagattgttttgagtcatgaatgggtctcaggatagccctatcagagccaagggtagctgctcagaataatacaagcaattaaggtagagtctggggttccctcttaccgtgccttctgacttccaaacaaacaccctggggtcagagagggctggccagtacaacaactacagtggctcagtcagtgcctcctctaagggaaaggttgctggaccagaccctcttcttgtttgccaaagccagagtctccctcagatatttttgatggaagtgtatgaatgtatgtaatgttttgtggcctcaactgaatgcctcctgtggggaagggatgggggtgtgacagtcatcatcagggcctgatgcctgagagaattggctgaataaagatgtaagaatt

SEQ ID NO: 189 - DNA, 813 bp, Mus musculus
atgggcgaggctgaaacaccttccttcgaaatgacctggagcagcacaaccagcagtggctactgcagccaggaggactcggactcggagctcgagcagtacttcacggcgcgtacctcgctggttcgcagaccgcgtcgggaccaggatgaggctgtagagcgggagacacccgatctttctcaagctgagactgagcagaaaatcaaggactacaatggccagatcaacagcaacctcttcatgagcctgaataaggatggctcctacacaggcttcatcaaggttcagctgaaactagtgcgtcctgtttcagtgccttccagcaagaaaccaccttccttacaggatgcccggagaggtacggggcggagcacagccgtgaagcgccgcacctctttttacttgcctaaggatgctattaagcatctgcatgttctatcacgaacacgggcacgtgaggtcattgaggccctgcttcgaaaattcatggtcgtagatgatcctcgcaagtttgcactctttgagcgaactgaacggcatggccaagtatacctccggaagctgtcggatgacgagcagcccttgaagctgcggcttcttgcagggcccagtgaaaaagccctgagctttgtcctgaaggaaaatgactcgggagaggtgaactgggatgccttcagcatgcctgaactgcacaatttcctacgaatcctgcagcgggaagaagaggaacaccttcgccagatcctgcagaagtattctcgttgtcgccagaagatccaggaggctctgcacgcctgtcctttggggtga

SEQ ID NO: 190 - DNA, 27589 bp, Homo sapiens
acaaataaaagtgccggttaattacaaaaaaaaaaaaaaaaaaaaaaaaaaatcgtcctgatgcggtgactcacctgtagccccagctactcaggaggctgaagtggggggatcatttgaggccacgagttggaggctacatttagctgtgatcccatcactgcaccccagcctgggtgacagagcaagaccccatctcaataataataataataataaataaacctagaaagaagcagatgtagccaggcgcggtggctcatgcctataatcccagcactttgggaggctgaagcgggcagatcacctgaggtcagatgttcaaaaacagcctggccaacatagtgaaaccccatctccactaaaaaaaaatacaaaaaattagccaggtgtggtggtgcacacctgtaatcccagctactcaggaagctgaggcaggagaatcacttgaacctgggaggcagaggttgcagtgagccaagatcatgccactgcactccagcctaggtgacaggagactcaatttcaaaaaaagatgtgatcaagagtgagttgggttggaggcagggactgctctggattaaatggccaagaaaggccatgctgaggtgtaaactgagccctgaaggaaaagtattccaggcaaagtgcaaaactctgaggcaaaaacctctttggaatgtatgagggaggttcagggaagcaaggaggagaggaaagaatccaagtcccgaggtacaggagaggacaagaagtagatcttgcagagctgctagtaagcggcatcccacctaacattttgagggccagaagtagccacagagcccctctcacgcaagggagtaatgtctatatgctttttttttttttttgagacggtctccctttgttgtccaggctggagtgcggtggtgcaatcttgcctcactgcaaactccacctcctgtgctcaagcgattctcctgcctcagtctcccatgtagctgggactacaggtgtgtgctaccacacctgtctaatttttgtacttttagtagagacagggtttcaccatgttgcccaggctggtctcaaactcctgacctcaagtgatccgcctgcctcggcctcccaaagtgctgagattacaggtgtcagccaccgcgcccggcctgatatacacttttaaggctccgggctgtccatgaggatcaagcgtggaagtaggtctacagaaaaggctgccgcagttcacccatgacaggtgatgacagtctggacatagggaggatggagagaagtcgtgcgccctggcagtatttcaggagccaactagtggagccgggacgcgagaaatagaggaaccaagaagccataaggaggaggaagagcagcgggtaggtcaagatgccacagccgcaggaggggctgttggggtcggggttacccccatccctgtgcaggcggacttggcgtctgaggacagagtccagaccacaaggatctggagctcaggagagactcgtgggccacagcccgagaaagcgctgggaatccaaatactatggcgattggcagtcgcgtaggcgaggcgggctagagacccgcccggatttaggcgcgagccacctccaggggcggggcccaggccgcactgcgcaggcgcggctaacccgtttccatggctgcgagaactgacgctccccaaccgtcccgcaactgtcctgtcccagactttggcaccgtcggggtccgtcgtccccgaatgtgacagcatccccaccccggctgctgcccaggatccgccggaccccggcctcgatatgggagacctggaactgctgctgcccggggaagctgaagtgctggtgcggggtctgcgcagcttcccgctacgcgagatgggctccgaagggtgaggcacccgggtcaggcggagtcccggagtcattgtccttgagtcggggagctggggcctgactcgggggaggggctgcccagtgtggaggggctcccaaatgggggagcagagcgttccgagacaggagtattactgctcctgagccccctgtgtcccctcaggatcaggttaggcttcagtaggatccagcccccatccccactcctaatgcacacacgtggacgcacatgcacttaccctctgaggcaggtggaaccagcagcatgagaacctggagaagctgaacatgcaagccatcctcgatgccacagtcagccagggcgagcccattcaggagctgctggtcacccatgggaaggtaccccgaggtcacaggcagggttcctgccttcccccatacctcacctactctacccctccggagtcccctgtgtgcccttcccctctggcctggtacacctgttctccctgaaggacaaagaggaatgtgttacatgtttcattttgtatccctattggacaggactctggcacaccaggctgggtgcagggcatgagttgattagggagaaagctgtaggtcctagaacagcttaggcttcaaggggaaggcccaaatgctaaaggcatctgtgaattgactgtaaggctggtggtggggaaggggtggggaggggttggggagggcgggagggaggggagataacctaactggaggtggaacttcggcatggaaggaagcagccttcccaacatgaaagggggaagttagaaaccagggagatgcctggctggaacatggaccagggagtgtcaccagcagatgacctgagatatcaattgaccaaaaaaaaaaaaaagccgggcatggtagctcatgcctgttatcccagcattttgggaggccaagacgggtggatcatctgaggtcaggagttcaaggccagcctggccaacatggtgaaaccccacctctactaaaaatacaaaaatttgcagagcatggtggtgcacacctgtaatcccagctactcgggaggctgaggcaggagaatcgcttgaacctgggaggcagaggttacagagagccaagatcatgccactgcactccagcctgggtgacaagagtgaaactccgtctcaaaaaaaaaaaaaaaaaaaagaaaggtcctttgcaaaagaaagatggaactcatactaggggataggataggaacagggcactgtgaagggtcctgagtaggagtgaggccaaggcacacaagagctttggaggaccacagacagggactagagggagggcatgaggagaagggctggcttgaaagggatgcctgaatgggcgggcagaggataagggtgcaggtgcaggcagggcaaggcagtctgggaactgggcaggagccagtcacataagcatgagggacatccacagaggtgttgggagcagctggtaatgaaggtccaaggtgcaagagagaagtcaggaaggatactcatgggtctggaatagtttaggggcccagcagtgtttggggatatcagggttgagctgagccggggatgggagggttgccaggcaaaggtaggcccatctcatccctgtcctttaccctacccttcaaaggtcccaacactggtggaggagctgatcgcagtggagatgtggaagcagaaggtgttccctgtgttctgcagggtggaggacttcaagccccagaacaccttccccatctacatggtggtgagctgggcccctggttcatacctcttctcactccttcagagggctctggaccggggaggagagctggtagcccctatcccttcctcaggccctgtccttctctttatctgacaggtgcaccacgaggcctccatcatcaacctcttggagacagtgttcttccacaaggtgagggactatctctgcccatgggccacagttccgggtcagggcctggcaggaagggagattgtgtctgtgtggggaaggcatcagacacagaaagtttccctcctccttttcccaggaggtgtgtgagtcagcagaagacactgtcttggacttggtagactattgccaccgcaaactgaccctgctggtggcccagagtggctgtggtggcccccctgagggggagggatcccaggacagcaaccccatgcaggtgggttgaggttacctagggttgtgaaagcctaggtctgggttccccaaggcctgcgcaggtgagggtggcccagcgtgaacactgtgtgacctcccaggagctgcagaagcaggcagagctgatggaatttgagattgcactgaaggccctctcagtactacgctacatcacagactgtgtggacaggtgagcagtccgactgggcctgggcctactgtggagggctggaagaccgggcctgtagcctgcctctactcacctccttcacaacgtccctgcccctagcctctctctcagcaccttgagccgtatgcttagcacacacaacctgccctgcctcctggtggaactgctggagcatagtccctggagccggcgggaaggaggtagggtcctcccccaccagcctaagccccaggctactgcttcagggtatctttttgatagaggggggcagcttgcacacacgaagacaaaccctgtccccaagcccactgaggataccaggatgcctcagccaaggttggcctagacctgagctctgcagcaggccaggcccatgtgtccactactgaggctcaccctgctctggggtcagcagccctatagcctgggcaagtcctgcagcccaggttctcccattcccaggcagtggtcagtctcccagcccccacagctggctcacttgaagagaattcaacgtctgcacccagtgtgctggttcctctccccaggcaagctgcagcagttcgagggcagccgttggcatactgtggccccctcagagcagcaaaagctgagcaagttggacgggcaagtgtggatcgccctgtacaacctgctgctaagccctgaggctcaggcgcgctactgcctcacaagttttgccaagggacggctactcaaggtcagactccctccgcaccagcccccacagccccagtaccgccctccccatcctaccccgactgcgtccctgctgtttatctttgcccacccacctcaaccccagtgctcttttcagtccttgggcctcaggtgacacaccagctagtgggacatgggcccccacaggcattctcagcccaacccagccccttccttttccttggccccctggccagcacctgcatcacactggcctccactggacacccttgcagcttcgggccttcctcacagacacactgctggaccagctgcccaacctggcccacttgcagagtttcctggcccatctgaccctaactgaaacccagcctcctaagaaggacctggtgttggaacaggtaggcactggaaagttagctgctcaggaccactgtcccactttaccagcaccttcctgccactctccacttctctctcctagatcccagaaatctgggagcggctggagcgagaaaacagaggcaagtggcaggcaattgccaagcaccagctccagcatgtgttcagcccctcagagcaggacctgcggctgcaggcgcgaaggtaaggcctgtggaaatggcagggagggtggaggggatgcaggaggcatggatgtgggtggggtgcccccaccttccagggccagtcagaccttcctgactttcccccaggtgggctgagacctacaggctggatgtgctagaggcagtggctccagagcggccccgctgtgcttactgcagtgcagaggcttctaagcgctgctcacgatgccagaatgagtggtattgctgcaggtgagggtatcctagaaccttggacctctaagccctactcccacatcccccacatgcattgccatcctcaatacccacctgcctgcagggagtgccaagtcaagcactgggaaaagcatggaaagacttgtgtcctggcagcccagggtgacagagccaaatgagggctgcagttgctgagggccgaccacccatgccaagggaatccacccagaatgcacccctgaacctcaagatcacggtccagcctctgccggagccccagtctccgcagtggagagcagagcgggcggtaaagctgctgaccgatctccctcctcctcaccccaagtgaaggctcgagacttcctgccccacccagtgggtaggccaagtgtgttgcttcagcaaaccggaccaggagggccagggccggatgtggggaccctcttcctctagcacagtaaagctggcctccagaaacacgggtatctccgcgtggtgctttgcggtcgccgtcgttgtggccgtccggggtggggtgtgaggaggggacgaaggagggaaggaagggcaaggcggggggggctctgcgagagcgcgcccagccccgccttcgggccccacagtccctgcacccaggtttccattgcgcggctctcctcagctccttcccgccgcccagtctggatcctgggggaggcgctgaagtcggggcccgccctgtggccccgcccggcccgcgcttgctagcgcccaaagccagcgaagcacgggcccaaccgggccatgtcgggggagcctgagctcattgagctgcgggagctggcacccgctgggcgcgctgggaagggccgcacccggctggagcgtgccaacgcgctgcgcatcgcgcggggcaccgcgtgcaaccccacacggcagctggtccctggccgtggccaccgcttccagcccgcggggcccgccacgcacacgtggtgcgacctctgtggcgacttcatctggggcgtcgtgcgcaaaggcctgcagtgcgcgcgtgagtagtggccccgcgcgcctacgagagcggaaggggcagccaaggggcagcgcagtcgccgcgggtcaagtcgcggcagagggggtcggcggggacagctcccgaggactaggtccgttactttcgccccatcgctgaagagtgcgcgaaaatggtttatcccttgtcgcactccactcgtatctgggccacagatgagcagaggtggctgcttatatgtaaaaatacgctgattttaagtttcttatctttaaaatgccttggcccttcttgagaaagggtttgtgcctactgtcctcggagtccatcttcccaggcttgcctcttctcaaacactcatgaccccctccagaacctttagggtgaagggaaattaccacctatgggagggagcctggaaaaatttagaacctttggtgggccccctgcaagcaggagttttgttgagtctttatttagcaaacacccttttctgacccagtgaatcagatgctaaaatatgcacgcagccacacacccagcagtccttctgcacccctgggaatcgccagcaagcaaaggttgctctcccctgggtagacaccagctggaatcaccaggggtgcttttacagtcctccccgctagcctggatcccaccgcagacctgttgaatcaactgctgggagtggaccctaggcatcagtaaattttaaaaactccccaaattattgtaacatggagtctgggttgagcatcactgctctggcctatttaggaacttgtggatggatagtgtcccaggtctgtgtgtgcatggagaccctctcatccggtacaagaggacatcacaaattcagctggggggagcacaaagttgtgacagaatgcaaagaatgaacaaggggccgagcgcggtggctcatgcctgtaatcccagcacttcggaaggcggaggcgggtggatcacctgaggtcaggagttcaagaccagcctggccaacatggtgaaacctcatgtctactaaaaaataaaaaaaaatgagccaggcgtagtggcgggtgcctgtaatcccagctactcgggaggctgaggtgggagaattgcttgaacacaggaggcggaggttgcagtgagccgagatcgtgccactgccctccagccttggcgacagagtgagactctgtctcaaaaaaaaaaaaaaaaaaaaaaagaccaaggctgggacattgcagcgttctcaaagagaaataaagtagccatggagataagaagcaggatgatttgggcatgtttatcagaggtagagacaagggagaaatcaaagataagtttgggcttttgtctccagtaactgggagcctagtggccatttttgctgcaaagaggaagctgggcaagtgtagcagtgaggctgaagaaaagggaattaaattttggccatgttcacttgaaacgtcttttagacatcctagtgaaggtactggcacggaggatctagtctgagggtttaggtcagtgtttcagccgtggatctggggcagatgaatgtagacagaccaggccagtgatcaggactgagcccagacttcatcgtgagatatggaagttgagtcagaatctgcaaaggagctgagcaggagctgcagggggtaggaggaaaactgggagagtgtagcccctgggagtcaaagggagcaagcttcaaatgatgctgagggggtgagaatggagaatggaacactggattccatttggtagtacacagatcgctgaggaccctgtcccgggcagtttcctggaggaagaggcaagcctggctggagtgggtagaggggagagtgaaggcgaaggattagagtgtatagagaccagtgtcttggtctgaggggagtagagacaggtgacaaccacagggcagacgtaggttaaaggtgtttagtttttccttcaagtaaatgggcagatgtattccatatacgttcccagtgaagggccgggtgcggtggctcaagcctgtagtcccagcactttggaaggccgaggcgggtggatcacctgagatcaggagtttgagaccagcctggctaacatggtgaaaccccgtctctactaaaaatacaaaaattagctgggcatggtggcgggcgcctgtaatcctaggtactcaggaggctgaggcagaagaatcgcttgaacccaggaggcggaggttgcggtgagccgaaatcgcgccattgcactccagcctgggtgacaaaagcaagacgcagttttttgttgttgtttttttaattgccaatgaggaaaggggaagttctgtgctaggcgatagagatccaactgttgagcaggcctctctgcctgtggccttccggccggtttccagacgcccaggtggccaacattagagtccgcgtagcagtgtgaggtaacccactgagataggtcgggcctgcggagcctggcgagcagcggccctctccctggggcttcccttcaatctccgggacatttccccgacctggagctcctccgcctcaccgccaggcctctctgcagattgcaagttcacctgccactaccgctgccgcgcgctcgtctgcctggactgttgcgggccccgggacctgggctgggaacccgcggtggagcgggacacgaacgtggtgagcgcggggccgagggcgtatgggaagggcgaggatgggcaggccacagtgcaggcattctcgagggctgcctgggtgccgcgcgcaaggagcgttctaattgccgatttcccggcggcacagagaggctaattctgcgcgggggctgggaggggagcctggattgccggctccgcaagtactccacccgctgcaagcggacccgggcccaggctgacccaggctccgcgcacgcgcacttcccgcaccttcccgccctcgcctccggccagaggccactcttgtgcgcttgcccggacgctggcacccgcccccgttccctgtggtaggtggggtctgtgagtggagctccggagcgatgaggtcattcctgggggcgaagcgtgcgtgtccccgccccggcgttcctgccccaatgagacaagagctagatcccggcgatctacgtttcagtcttaacggttgcggcgcggctctggcccgggcgcacgcgcacactgacacgcgtacacgcacgcacgcgaccggggcggtggttggcggctacggacgcgcaggactgggggacgggcgggtacggctatgggcgaggcggaggcgccttctttcgaaatgacctggagcagcacgacgagcagtggctactgcagccaagaggactcggactcggagctcgagcagtacttcaccgcgcgaacctcgctagctcgcaggccgcgccgggaccaggtgggagccagggggtgccggcgggcgggaggggaagcggtcgctggagctccgccctccccggtccgttgccgcgtcctgggtcggtgggcagccccaccctcctggctacgtggctccccgcgggtcctggccggggacctgcccgcggaaccgtgcgtaagaccccgattccaccgcctagatgctgggtgccggggcccccttggtttctgtcacagacaggttgaacacggaaaaagcagctgtatggcttgtggtagacctgagccgggcattatccagctatgactaaagccgaccgagcagtttggactagcacctcgatttccgcgttcgaatgctcctgctccctccttggggagactaggggaggatgtggagagggaagagtcctcgccaggaattgagaagtatgtttaggaaaacttgagaggcagagagagatcctgctcctccatctgcactcctgtatggagccagctgagccctcacctcttccctgttctggcctgtcaccagctgctggaatgtggaagattctgttcccttcctctagggtggatctggagaaagatttgggaatagataggaaagaagtcttgttttggaccataagcattcaggagcactttacccacaggaagggggaaagctagattataaaatgcctaaagaggtggaaaaagagatccaggttactaacccaggactgtaaggtgtctcggaacctcctaggtatccccattatcggagaactgtgtgccagatgccattggtgtgaccaccaggctcagagaaccaggcctaggcaccaggaaaaagaaacagggactgtgaagctcagtatgcctggcagaaatggggcggaaatccttatttaagtaaagaaagtggagttgtgagtgatgcttcagataaaattttacaaaattccttacaaaatgggtggtgctcagcacgccaaaatcttagcccagagcttgggtgcaagggttgagttgagtgtagacccctgggcttgtcttcatgtcagtcagtcctgagccattttccactgtggaaaggtgggaaaaccacaagacactaaccaattgaaaaggagggctagccacggaggtgcacacctgtaatcccagctacttgggagggtgaggcagaaggatcacttgaacctgggaggcagaggttgcagtgagccaagatcgtgccactgcactccagcctgagtgacagagtgagactctgtctcaaaaatagaaaaggaagccaagtacggtggctcacacctctaatgccaatgctttgggaggccaaggcaggtggatcatttgcaatcaggaattcgaggtcagcctggccaacatggtgaaaccctatctctactaaacatacaaaaattagccgggcatggtggtgtgtgactgtagtcccagctacttgggagactgaatcacttcaaccgggaggcaaaggttgcagtgagccaagatcgtgccactgcactccaacctgggtgacagggtgaggctctgtctcaaaaaaaagaaagaaggctgggcttggtgactcatgcctgtaatctcagcattttgggaggccaaggcaggcagatcacttgaggccaagagttcgagacctgccaggccaacatagcaaaaccccgtctgtactgaaaatacaaaaaaattatctggccatggtggtgtgtgcctgtaatcccagctactggggaggctgaggcaggagtatcacttgaacccagaagacagaggttgcagtgagtcgagactgggccactgcattccagcctggatgagagagcaagactctgtctcaaaaaaaaaaaaaaaaaaaaagaaagaataggaggctgagaagtcccaagttatatgttaaaaaaaaagaaaaaaacatcagttttaggccaggtgcagtggctcacacctttaatcccagcactttggaaagccgaggtgggtggatcatgaggtcaggagttcaagaccagcctggccaaaatggtgaaaccccgtctcgactaaaaatacaaaaaattagccagttgtggtggcaggcacctgtaatcccagctacttgggaggctgaagcagagaattgcttgaacccaggaggcagagattgcaatgagccaagatcgcaccactgcactccagcctggaaaacagagcgagactctgtctcaaaaaaaaaaccatcagtttttatggacagtggtagagtggagggtgggtccctatggtgcagaagggaaattccatggtcctgctgtgcatccgactgggatggctgttgaaatcctcttccagcaggcagctttggaaacagaaaaagaaactcttcctcctttagaatcctggaagggctgtgcagtgcctctaatccaagtctgttttctgagtgaagatagggaggttcatcaccagaagggaaggggctggaaatgaggtcactgcatcccagcccagggctcctgggtcatccaggaagggaagaaggagcaagctttctcattgttaggtaggagctcagagccatcacaagaacaagttagcaccatccctgtgccctccctgttctgcaaacaaaatgatcttccttcttgccctggcactagagtctgtctggcatttctcctgcccctagtactcctcccatctgggtacttcttcccgttggtgtactgaacaaacacatccactgctttattcacagcctccagccctcattttccagggcccacaccatttgtttttactaacccgacaaggttgcccactgtccccagtaaggtttgtactggggtttttactccagtgctcttctccatccaggagacctttggatacttggggaagaaaatgagcttaaattcccacccctccccctttacctttttcctgtaaggccctggccttagttcttagccccacatccttgctggctgcagaatagcagcgggttctgggtaaggagcattctgctaaaacgctccaccctgctccctcatctgtcctctccatttgtccccatcagatggtttaagtgcttaaggggactccagggcggagtcagggagaaccctggctctcctgggctaggcacaagatcattctacaggaaaccttgtgggaattcttctgggacaaattattggtcagcgctgagcttagctgtgtctgtgacactcgcattctaactagggcctatctgacgtcaacaggaagtaaggctgatgcagtggggccaagggagtctgggagaagaaagtcggttcagagccctggctgccctgtcccacactccacccttccggcaagaatccagtccctagatgaggtggggagtgagtggtcgagttaaaaatctctgggtcgggtacgatggttcacgcctgtaatcccagcactttgggaggtgaaggcaggcggatcacttgaggtcaggagttcaagaccaacctggccaatgtggtgaaatcccatctctactaaaaatacaaaaattagccgggtgttgttgtggcacgcgcctgtagtcccagctactcgggagtctgaggcaggagaatcgcttgaacccaggaggcagaacttgcagtgagccaagatccagccactgcactacagcctgggcgacagagtgaggcttcgtctcaaaaaaaaaaaaaatctttgggccaaatctccagacagcacaggcaggtgcagaaacccaccaggaagctgcctgtgtacctctggcagattggagcctggcctaaagctgccttttatgcagcttgggtcaaggttaaacatcatgtcacagtgatttttctcactatgtgtgagacatggagaactggctccaagtactactctgtccactggtggctggactactgatgtgcaccactctccactcctctcaccctgcagtgggtcatggccccgtgccggggcagaggagaaaaatgggctgccttctccaggacaaaccctcactccaactcaactagggtgctgtgatcagaatgtgcaattgaggtgtgattttactgattttttttttttttgagaccgagtttcgctcttgttgcccaggctggagtgcgatggcacgatctcagttcactgcaacctccacctcccgagtttgagcaattctcctgcctcagcctcctaagtagctgggattacaggcatgtgccaccacgcctggctaattttgtatttttagtagagacggggtttctccatgttggtcaggctggtctcaaactcctgacctcaggtgatccacccgcctcggcctcccaaagtgctagaattacaggcgtgagccaacgtgcccagcctgtttttgttttttgtgttttgaagcagggtctcactcagttccccaggctggagtgcagtgacacgataatagcttactgtagctgcaatctcccgggctcaaacgatcctcccacctcagcctcctgaacagttgggactacaggcacaccaccacacctggctaatttttttttttctttttttagtagagatgaggtcttgctatgttgcccaagctggtctcaaactcctgaggatcaagtgatcctcctaccttagcctcccaaaatgctgggattgcagatgtgagccaccacacccagcctgattttactttaaatgagagtccctcttcagagtccctcagctgttcctggcccctggccatgtgccttcagttgcccctgcttctgtggtatccttaaggctacattcagtgctgaggccctaggcaggcagcagagagaagccaaatgattctgtctttcccttatccacccagagcatgcaaaaccaggagcagtggtgggttcagggtgggcaccagctatgtatatgtacatcagggacagggggccaaaggcagtcagtttccaaagactgccccagaggccatttttcagagaagccctgggttcctcaagggccctgtgtccatgctggcccatcttgcaggacgagcctgtggagtgggagacacctgacctttctcaagctgagattgagcagaagatcaaggagtacaatgcccagatcaacagcaacctcttcatgagcttggtgagttgactgctcaggaagggggcgtggggaggagcaggtacccagctatgtgcctgatactcagagggtcacaactgaggttatcttgggtgggcgcaagcagtaatttgtgcatacccagcctagccccaagtagactgacatctcacctggaacctattatcaaggtttggtttctctatttctttagaacaaggacggttcttacacaggcttcatcaaggttcagctgaagctggtgcgccctgtctctgtgccctccagcaagaagccaccctccttgcaggatgcccggcggggcccaggacggggcacaagtgtcaggcgccgcacttccttttacctgcccaaggatgctgtcaagcacctgcatgtgctgtcacgcacaagggcacgtgaagtcattgaggccctgctgcgaaagttcttggtggtggatgacccccgcaagtttgcactctttgagcgcgctgagcgtcacggccaaggtgggcttcccaccccaccctgccctatgtgagggtatatacgcatgcacctgagcatgcaggggctgagcagctggccctgtctctgatcattacttccccttcacagtgtacttgcggaagctgttggatgatgagcagcccctgcggctgcggctcctggcagggcccagtgacaaggccctgagctttgtcctgaaggaaaatgactctggggaggtgaacgtgagtacatagttcttagtttcttggttgtcactagacaggactgatgggctgtagctacagtaaggcttggaggaggaattgtgctggaagacaagccctgcaaaacagttccaggagtgtataggcattgtaactaaagcaaaggcttccagaccactcatgccaaagcctagggttgtcccaagaagccaggaagaattgccttggtgctttgatctttcctggtgtggaaaatcttctggagatgcaggagtccatctaatgacatgaggaggcccccttcagactttttacctggaagctttctggctccaaggtattaggcctgtggagtgaaattagactcagaatatgcctgacctgtccacaggtaattggggaacatctgacttggttgtctcagtaaggtgaccgttttgtagggcccatcttccatacaaactgctgtcagggatcctaccagagatcattcagccaagagcctgacatcagaaagcccagtcctagcttgtgtgaacatgaggtgctagtcttctctggggagggtctgctggcttggccatcccttctgcagcctgtacactccccttttgccccttgcagtgggacgccttcagcatgcctgaactacataacttcctacgtatcctgcagcgggaggaggaggagcacctccgccagatcctgcagaagtactcctattgccgccagaagatccaagaggccctgcacgcctgcccccttgggtgacctcttgtacccccaggtggaaggcagacagcaggcagcgccaagtgcgtgccgtgtgagtgtgacagggccagtggggcctgtggaatgagtgtgcatggaggccctcctgtgctgggggaatgagcccagagaacagcgaagtagcttgctccctgtgtccacctgtgggtgtagccaggtatggctctgcacccctctgccctcattactgggccttagtgggccagggctgccctgagaagctgctccaggcctgcagcaggagtggtgcagacagaagtctcctcaatttttgtctcagaagtgaaaatcttggagaccctgcaaacagaacagggtcatgtttgcaggggtgacggccctcatctatgaggaaaggttttggatcttgaatgtggtctcaggatatccttatcagagctaagggtgggtgctcagaataaggcaggcattgaggaagagtcttggtttctctctacagtgccaactcctcacacaccctgaggtcagggagtgctggctcacagtacagcatgtgccttaatgcttcatatgaggaggatgtccctgggccagggtctgtgtgaatgtgggcactggcccaggttcataccttatttgctaatcaaagccagggtctctccctcaggtgttttttatgaagtgcgtgaatgtatgtaatgtgtggtggcctcagctgaatgcctcctgtggggaaaggggttggggtgacagtcatcatcagggcctggggcctgagagaattggctcaataaagatttcaagatcctcctgctgttggaatcttttatacatataaagtttttgtagagacatgagtctctctgtgttgcccaggatcctcccaacttggcctcccaaagtgttgggattacaggtgtgagccaccctgcccagcctggactctttattattataggcgcagagctgcagttgcccctcatggtgccagaagttgccaagggtgatggacaggctcccaggtgtcttgcaaagtcaccatggaccaatttgtgaagatgtagtatgcatacatacttggtcatcactcagctccctggggctcaggttgtggtggagacaaaaatggactgcagttagaacttagggaaactggctgggcatagtggctcacacctgtaatcccaacactttggttgggctaggtgggcagatcacttgaggccaggagttcgaggccagcctggccagcatggcgaaaccccatctctaccaaaaatacaaaaaaaatttagctgggcgtggtggtgggcgcttgtagtcccagctactcagaaggctgaggcaggagaatcgcttgaacccggcaggcagaggttgcagtgagtggagatcacaccactgcactccgatagagcaagactccaactcaaaaaaaaaaaaacggccgggcgcagtggctcaggcctgtaatcccagcactttgggaggccaaggcgggtggatcacctgaggtccggagttcaagactgcctgaccaacatggtgaaaccccgtctctactagaaatacaaaaaaattagccggcatggtggcagatgcctgtaatcccaagtactcgggaggctgaggcaggagaatcgcttgaaccctggaggcagaggctgcagtgagccgagatcgtgccactgcacattatcctgggcgacaagagtgaaactccatctcaaaaaaaaaaaaaaacaaaaccatcccttcaacacacacacaccacgctctgggagaaggtgtggcataactccttcaccaaatacagagctgccaccgtggaccagacactgctcgtgataccgagggtatagctgttaacaattcttgctttcattaagcatggactctgctgggtttgaaaacactgaattcgaagttcttcagaactgaatgtaactatgtgaatctggccagttccttaattttctttcaacttggttagttcacataagcgtggcaatcgcaaaaatacagctgtgaaaatagaagccagatgggcacccggcggtctggccttaggccctgaagtgcaggtttgaggattggtgcttgcgaagtcctgctaggcctgaactcaggtgttgggggacgtcagagccgccaaatacacccaaaagaccgggaggactcacggccaccactttcctcggtgggagctgtcccagctggtcagatcgcgcttgctgggacctgggatctcgcaacgcatgctgggatgcccagcatctaagggcgcccattggtcccgcccccacgacttgagcaacagccaatcagaggtggcagcgtgcggaagcggaagtgaggtttccgtggagacagccgagcctgcggaaggcggcggcggcggcacctgcgatcagcggctggggcaggttatggtagtgcggactgcggtgtgagcagagcggccacggggcccgccatgcgccggcggccctgacatgggcgccagcgggtccaaagctcggggcctgtggcccttcgcctcggcggccggaggcggcggctcagaggcagcaggagctgagcaagctttggtgcggcctcggggccgagctgtgccccccttcgtattcacgcgccgcgggtaagggcatgggttccaccctggcggggggaacaggcgggcggccaggcgtcccgcgccacgggggaacttccaccgctgtaccccactacagccaagccaggacgacccccatattttgagcctcattggagctgggggtggagaaagccgggcagtggtctcctggcggcctggccactctgaaagtctccctagggaagagtgggcctgaggcttgtcactggtcggaccttccgcacggtaaagctaagctagggcctccataagacctccataagatctcttcctttcatcccttccggctcagcctgcatactgaagggtcctagcctccctttcccccccagttattccaaggggataataaccctctgtttaggctgcttttcctgacagtagtggggctgaacctttgagcgtagtggctgggaaagcagggataggcctcagtattgggggtgaggctgaggaaaaaagaccctcacccagttatgttctccagatccagagcgctgacctacccacccaacccccagcccagtctcccagaggcccgcacaagagtaccagattggcttggctctagtgggctcctggagatgggcgctccctgtgctagagatttggctgtagacaccaggaagacccaacagtggcaattcaccagccacctggggtgtggggtcaggggagacgcagccttcattcctttgtgcttcttcctagcttaggcttctgctatttcagtctttgacactgggccagcagcatcttctggagtgagaccaacatgcccaggccaccaccctgcccactctagaagtcctgggtgaaggcaaagtcctgatattagaatggctgcccttgctgaacaaatcaaggatgagaactggccttggtggctgcctggatggtgtgctctggtgtgggctctcttcttgggggtctgacatagtagcactgcccacccatcacctcacttcccactttcttctagtagaccccaaaccccaggcaaaggattctccaggcaggccaggcaccgtggctcacgcctgtaatcctaacactttgggagatgaagacgagtggattgcctgagttcaggagttcgagaccagccagagcaacatggcaaaaccccgtctctactaaaatacaaaaaattagcagggtgtggtggtgcatgtctgtagtcccagctacttgggaggctgaggcaggagaattgcttgaacccaggaggcagaggttgcagcaagctgagatcgcgccactgcacctccagcctgggcaacagagtgagattctgtctcgaaaaattttttttaaaaaaaggattctccaggcatattatcctcttttcttcccacttggggttgggaagaccacagacttccccgtgacctgtgacatttgccatgcccaggtgtggggctccagcccagcctgtttccttctccctctacacagctctatgttctatgatgaggatggggatctggctcacgagttctatgaggagacaatcgtcaccaagaacgggcagaagcgggccaagctgaggcgagtgcataagaatctgattcctcaggtgaggggctgggcagcggtcacagagcctacactaagcgtgtggaggtggacccagatgggatctgttgtcatggtgggggcttttgcggggggatctgggaggaacaaggaagcttcctgaagtagaggccctgagctgacccttactagcctctgtttccatggcagggcatcgtgaagctggatcacccccgcatccacgtggatttccctgtgatcctctatgaggtgtgaccctgggaggtggcagacagaagcaccccctgccccggcaagaaactcccaggctcaatcaaggtgtggcttccattgaggagcccaggctggggccacaaccctgaataaactctgttggcccataaccttcagctgtgagcgggtcggtcccacagtattggttgggtgttggtttgtgtgtggacaagaggtggttggtgggtggtgaaggctaatggcagagttagcaccccactctcccaagccacccctgcaagcagcacagcagggcatataccagtcaggaatgcccgttacctggttccttgcctggtctgctttcttccaagtttgcctggggcctagccctgctagaggctacagcactttacaagcaaggtatgctttcttccagcccctaggctgtgggcactgtatacaagtaggaacttcctttccttcacttcccttttaacccctagtcagagcatttcagccgtttgctacctcgattcctcctgtgttggacagaggctgggggcagtgccagcctgattcttccgacctacctgccatttgttcccgccttcagatggatggacagtttgctggctattgataggagtggggactgggtgggggcttctccctctacccagggctgggctgatccccctactgcaactaactgttgccccccaaccccgaacccccagttgaggagttgagagagtgcaggctggggtcaggacaggctgcggatgcttgtgcctatggggagttactccaacccacctattctgtctaatctccatggctttgcaccaaatcctccacccctccaattgggaggggactgttcaccaccttgtggtaagggacaacaccctaaggctggtgccagtagttatgagtagcctaccaccccctcccttacagtaacccccaccccttcaggatcagtcaagggaaagcactagaacccctgggtagggaaagaaaggagggaaaaaccataaaaggaatacttataatgtgaaggtttgtaaatagtccatgatgatgtcgtggcagagtctgatttctatatagaggtgactttttttttaagtactgtgcaagctctgtgcttctataatgtgggaaatggcttggggaggatggcccctagcttaggaagactgttgtgttatttgttcaatttcaataaaatgatttgtagatcctgcacatgagagtggcatcctgtgggggctctgacacccagtgtctagactaccacctgggttcaataggtaggcctggcacaggactctggcaggccccctatgaccagcaaagcccaagagtaagtctgagcccagcctgtggccatcccaactgtggccagcaggtggctgtgtgttcacacagacctcactgcaggccccctgcagggtgggagggcactcatttatctgttgtgatccatgtggtggtgacccttggaatcagaaggccctgggatacttcactaaggattggccccacctgcctgatctaaggtgagagagtgtgacccaagatagttctggaatatctgtcttagctgtagcatcgccagctgatcctaagtggggtcatggcctgacccccatggacctcaaaggcccagctttaatggacagcagccagataggtgtccccacgcctttggcctactgccaggctcagcaacccaaactcatgtgcctcctctgaggcctgcctgcggacaccatgggagaatgagctcaggctgctgtttcagcaagcaaggctcggcccactagtattgcccctgctgtctgttgcccccatcttctcatcacctgcagcctgcccactgtggtcattctgcctgcacttctcaggggctgctataaggcagattctctactaggcttaggctttgactatcagtccaactcccagttaaagaggggagatttcagggacaggcttctgagtgtagggagctggtctgccagtctttcggaggtttgaacttgtcaaggctagggcaggatcaccatatccagcctggacttgcagttctgtggggtgcctccccatacccccataagatgccaaacatgaggccctgtcatcctccatggtccccctctactggctgttcaaggcccagggctctcccatgccagatagcatcctgtctcctaccaccactgtcccagcctgagggaactccctgtgctgggcctacccagctgaccccatcgctggaaacaatgggggtcaggcaacacttccccactctctcccgccgggctgtgctcacttccttcctgctggctgcctgaggaagtgtccctgccctgggacagtctggcctagcctttgtttccccgggggtccccacccatggagctttcaaggcttctggcccctgtgaagccagcacagtggtacagggacactgcaccttcccctaccatgtcttggactccttggtcctcagggccagactcctgggtattcacctacccctcacacagccttctgttgggggagaggctcctgggcattgggccattgggttgttgaggggttggctctgggtgatttgagggtaggtagatttgcacccctggagaggtctgctggaaccttgctgcagtcctccctagggccagccacaggaacacccctcccagaggagtatacccctttcctcatccatgttgtaaggagccccctactctgtatagtggactctgaaatccatccaggaatgaactccagcaggaaagcactctgcagaaccctcccagtccatcccctcctccccaacccacacagtcacactcactaacacattgtcctgtcacacaggatgcggaagctctcagtggaaaaaaacggactcagctactggaagtccccccgaccctccccccaaggctagttcccttcttgggcacctgctctgggggaccatcagctgaacgacccccaagtattttgactcccaaaagcaccaccacctgaccccatcctctcacaccctactggatttgaggatgggccccaatcctagggaaggagtgaagaggttccctagtgttggaagctgtgggtgtgggggagattggcacctgatcctgagcccatagccttcctgtcacctggcgcagctggcggggccagatcctactcgggaagggtggggagggcagccagccagcagggcattctggagggaaacagggtcaaggcgatctcctcccccacgcctgttcctggccctttcctctcagggggcagcaggaagtgaggagaaagggctgggatgggaggcgggagcggatgggagggaatggggtttatcaagtcctcggcgagctgcccaacgggcagcagctggcgcaagtagcctagctggagaggctcaccccaggaaggagggaggccaccgacctactgggccgacggactcccacacaggtgagcccagagcagacggctggtctgcacccccacagatgcgctcgcagttgcactccctccctctcctggcgcccgggagggttaggggctggtggtgcagacgcgggcccttttgggagttgagtctcgcacaagggagcggacctaggaagagccgaggtggtttcgcacggggctcgccagggtctaagcctgccccccaccgggagaggcctgtggagcgtagggggcgctggatacgggatggaggccctgggagacccctcttgctggctttctcggaggtccagccagaaactgctgcaaggaatggaggcctcctcggggttgagagggagccgggctcccaaaggacctcagagactgggcagaaaaggacgggatctcagggatgactgtcccgccctgatgcgagtcagggagaggggcggccaacctcctagacccctctgagcttccctgaccccaaccctgcggccacgccgcgacccagagccgggctgccaggataacgactgcctcggcccttcctgggccggctaagaagcggtgcttggccccttccctcagtctggcagggggcggggcctccctttagacggcggaccagagaagggggcccctgattcgtgggaggcggggcactactctccaggagaccagaggtcgcctcaggtcaaagtccctttttccacacaaaggggacccacggctggcgtctacgttagggggtgcagagccagatctggtgctgccccctgccaacctcggagtaccacagcacctcctgatggccgaacggggcaacgcctcctcctattcccccccccccccttcccgtccccctgccttgtccctcacactgtctctttaaagggctggcggcgccgcggagctgggaggactgaaccaccggcctcgggctgcaggggaaacatttcaggctgactggcgctcgtggctgagactcccatagaaagcccggctcagaggggcattagggtcctaaatgggcggccacgtccctctgcagaggacctggggctcttcgagcccgaaacgaggcaccggcaccgagaaaggtggaccacaccttcccgccccgtccgcaagtccaatcccgggcccacctccgcactggagtcttaaagggccagcgtgcctgggggcggagccagcagaggcgctgagccgggccgcgcctgggcgaacggccggagcgggctgggctgggcccgggatggcggtggccctggcgccggtcccggtggcgccccgcgcgaggtgagggcgggcggtgcaaacctggcggctctctccccttgggctggggtctgaatccccgggggtgctcgcggagaggcgtcccagaaaccccacccccacccgaccgggcgcaggccccacgtgtggggcgggggcggggtcccgcacaaagacccggcggagcgcgctctagccctgagcggccgggcgggggaggcgagcgcgcgcattcccggtggcggtggagggaagggccgggcggccggcgccgccgtgggaggtccgctgcccctttgtccctacggggcctcctccaagccgggagagtgtcagcgctcgagagaaagtccggagagcctcactcttctgccgggcgagtgttacacggatagaagcctcccggcagcgttccttccagtttcgtagcctcttgacgagctgttccctgctttacccaaatgctgtcgtttctctggatcaagggttcttcacggtgtacagggtgggcatcagctgttcagggttctctgaaaccatgtactggatggtatgcaggcatatatgtgactctggtgagcccaaattatctagttcttagaagggtcacagacctaatagagatttgtgccgagccacaggctacctgctccagaaaagagccctgtgcttctggcagtgagttcccagggtgccttgtctgccctgcagtggcctgtggtctctcaaacctattacagccatgagcacagtgcccccacacagcatgggctttgggagcatagatgggcttgaggtgggcacttccagtattccctagactgacttgttctccccaacccttcttccagttcctgagctggtgccaggcaggtgacacctcctgcagcccccagcatgcgggcaggcccaggccccaccgttacattggccctggtgctggcggtggcatgggccatggagctcaagcccacagcaccacccatcttcactggccggccctttgtggtagcgtgggacgtgcccacacaggactgtggcccacgcctcaaggtgccactggacctgaatgcctttgatgtgcaggcctcacctaatgagggttttgtgaaccagaatattaccatcttctaccgcgaccgtctaggcctgtatccacgcttcgattctgccggaaggtctgtgcatggtggtgtgccacagaatgtcagcctttgggcacaccggaagatgctgcagaaacgtgtggagcactacattcggacacaggagtctgcggggctggcggtcatcgactgggaggactggcgacctgtgtgggtgcgcaactggcaggacaaagatgtgtatcgccggttatcacgccagctagtggccagtcgtcaccctgactggcctccagaccgcatagtcaaacaggcacaatatgagtttgagttcgcagcacagcagttcatgctggagacactgcgttatgtcaaggcagtgcggccccggcacctctggggcttctacctctttcctgactgctacaatcatgattatgtgcagaactgggagagctacacaggccgctgccctgatgttgaggtggcccgc

SEQ ID NO: 191 - DNA, 1680 bp, Homo sapiens
ccggggcggtggttggcggctacggacgcgcaggactgggggacgggcgggtacggctatgggcgaggcggaggcgccttctttcgaaatgacctggagcagcacgacgagcagtggctactgcagccaagaggactcggactcggagctcgagcagtacttcaccgcgcgaacctcgctagctcgcaggccgcgccgggaccaggacgagcctgtggagtgggagacacctgacctttctcaagctgagattgagcagaagatcaaggagtacaatgcccagatcaacagcaacctcttcatgagcttgaacaaggacggttcttacacaggcttcatcaaggttcagctgaagctggtgcgccctgtctctgtgccctccagcaagaagccaccctccttgcaggatgcccggcggggcccaggacggggcacaagtgtcaggcgccgcacttccttttacctgcccaaggatgctgtcaagcacctgcatgtgctgtcacgcacaagggcacgtgaagtcattgaggccctgctgcgaaagttcttggtggtggatgacccccgcaagtttgcactctttgagcgcgctgagcgtcacggccaagtgtacttgcggaagctgttggatgatgagcagcccctgcggctgcggctcctggcagggcccagtgacaaggccctgagctttgtcctgaaggaaaatgactctggggaggtgaactgggacgccttcagcatgcctgaactacataacttcctacgtatcctgcagcgggaggaggaggagcacctccgccagatcctgcagaagtactcctattgccgccagaagatccaagaggccctgcacgcctgcccccttgggtgacctcttgtacccccaggtggaaggcagacagcaggcagcgccaagtgcgtgccgtgtgagtgtgacagggccagtggggcctgtggaatgagtgtgcatggaggccctcctgtgctgggggaatgagcccagagaacagcgaagtagcttgctccctgtgtccacctatgggtgtagccaggtatggctctgcacccctctgccctcattactgggccttagtgggccagggctgccctgagaagctgctccaggcctgcagcaggagtggtgcagacagaagtctcctcaatttttgtctcagaagtgaaaatcttggagaccctgcaaacagaacagggtcatgtttgcaggggtgacggccctcatctatgaggaaaggttttggatcttgaatgtggtctcaggatatccttatcagagctaagggtgggtgctcagaataaggcaggcattgaggaagagtcttggtttctctctacagtgccaactcctcacacaccctgaggtcagggagtgctggctcacagtacagcatgtgccttaatgcttcatatgaggaggatgtccctgggccagggtctgtgtgaatgtgggcactggcccaggttcataccttatttgctaatcaaagccagggtctctccctcaggtgttttttatgaagtgcgtgaatgtatgtaatgtgtggtggcctcagctgaatgcctcctgtggggaaaggggttggggtgacagtcatcatcaggcctggggctgagagaattggctcaataaagatttcaagatccaaaaaaaaaaaaaaaaaa

SEQ ID NO: 192 - DNA, 813 bp, Homo sapiens
atgggcgaggcggaggcgccttctttcgaaatgacctggagcagcacgacgagcagtggctactgcagccaagaggactcggactcggagctcgagcagtacttcaccgcgcgaacctcgctagctcgcaggccgcgccgggaccaggacgagcctgtggagtgggagacacctgacctttctcaagctgagattgagcagaagatcaaggagtacaatgcccagatcaacagcaacctcttcatgagcttgaacaaggacggttcttacacaggcttcatcaaggttcagctgaagctggtgcgccctgtctctgtgccctccagcaagaagccaccctccttgcaggatgcccggcggggcccaggacggggcacaagtgtcaggcgccgcacttccttttacctgcccaaggatgctgtcaagcacctgcatgtgctgtcacgcacaagggcacgtgaagtcattgaggccctgctgcgaaagttcttggtggtggatgacccccgcaagtttgcactctttgagcgcgctgagcgtcacggccaagtgtacttgcggaagctgttggatgatgagcagcccctgcggctgcggctcctggcagggcccagtgacaaggccctgagctttgtcctgaaggaaaatgactctggggaggtgaactgggacgccttcagcatgcctgaactacataacttcctacgtatcctgcagcgggaggaggaggagcacctccgccagatcctgcagaagtactcctattgccgccagaagatccaagaggccctgcacgcctgcccccttgggtga

SEQ ID NO: 193 - DNA, 92726 bp, Mus musculus
  misc_feature (122)..(148): "n" at positions 122 through 148 can be any base.
  misc_feature (3122)..(3263): "n" at positions 3122 through 3263 can be any base.
  misc_feature (7485)..(8927): "n" at positions 7485 through 8927 can be any base.
  misc_feature (24884)..(25439): "n" at positions 24884 through 25439 can be any base.
  misc_feature (36036)..(36055): "n" at positions 36036 through 36055 can be any base.
  misc_feature (46607)..(46729): "n" at positions 46607 through 46729 can be any base.
  misc_feature (77651)..(77670): "n" at positions 77651 through 77670 can be any base.
  misc_feature (81264)..(81462): "n" at positions 81264 through 81462 can be any base.
  misc_feature (89156)..(89175): "n" at positions 89156 through 89175 can be any base.
  misc_feature (90342)..(90361): "n" at positions 90342 through 90361 can be any base.
  misc_feature (91379)..(91398): "n" at positions 91379 through 91398 can be any base.
  misc_feature (92723)..(92726): "n" at positions 92723 through 92726 can be any base.
cttctgctgccgagccactcaaggggaagcgagcaggctgccagctcccagtcgccagcatctctcggccacttggaagccttctccggccagtgaccagcttgcttggtcgcagccacctnnnnnnnnnnnnnnnnnnnnnnnnnnnctccaggcccggagccccagccggggtctccggccaggctgggccatggtggtccccggagctcgcccccagcccccgccctccgaagtttgcctccctcctcttccggggtgggggaagtgctcctcggggcggtcggtggctggggctctagctcggcgtctggcgcccgccgggcttgggcaggttgctggaggcataatgagtgggatcctggcaccgcccggaaatccagcttttcctaacgcggggcgaccctggaaggacctgcccagcactaagctgccggccagggagaaccggcccgcgtgcaagccagagctaaaatatctgggggaattgtctgcaagctacttccttcccaaaggcagaaactgcccggcagatcacgagacaaagagaatagaaacgctctgaccaggcacgcatgtacagaaatgcattttagtaaccagctttcgcgcacaataacgcaagggtgtgagcggagtggctgtgacatgttgaatgctgtgtgccggcactgtattcaggggaattctgctcctggcgctagtaataccggaaaggtctcacttccaccgttaattcttgaagaagctgcaggctctattgctgtactggtgtgaatttatgctttatttaggggtttcatgattttaggacttaattttcccccttttcttttcctgtctttttcctctttgtcagacagtgtgaaataggaaaggatgaagcagttccgggttttaagtgtagcatgagattgtcatttcagtgagatcgagtttcaagttttaggtggtagggttactcacaaagctggttgacctaggctccttgtgcaagcctctcttaatatttcattagcttgtgttccatgttgggcatttgaaagatagtaaattatgagctaagaaagcttgtagtaggcagatgggtttatttctgcctcagagcagattgattgctaaagtagatatcattaggacttcagggccttctgcacaggtgagccgcccatgcatcgtttgtcactgagcagggaaccagcaccccaagagcccccccccttttttttcattttttttttgacagttgcactcaagcagaccattttctgaagcacacaagttgcttaaactttggaaaacatgtgctttttgcttattacaaagaaaatgatcctggtttttcttgtgcctcttgtggttcaaaggcaggtttaaatgggggaagctccttgcctggcaggagttctgtgccacgccactgctggctgccttcctctaagtgcctgttgcaggccacgccacttttccatagcagtctgtcagcttttacgatttgaagaaagttggatgcagctgataactggctctcagactgttgtgggagtttgcttttaactttcatcttgcaccaagacctgttcctagttgcataacagaactctgccatgtgcacattgttatctgtcattttatttgcatttttatgatagcattctgctttttcacatctgggatgcactgcagtcatgtaaaaagaaggatttcactgcccactgactccatttattgttttctttagctgtgtgtgtgtgtttggtacatttctaatgtatgaagttagtttgggaaaactgagcaattgaacacatagaaatatgcatttttggctgctgatggtgggtggtgtgcatgcatcttttggaactgttaattacacctaacctgatcagtgcaccccctgcccttttgttcttttattaagtatatattaattgtatacaacagtgaggtttttggggggacatttttctacatgcatgtaccatagtttgttcatattcattagccttttcttgtctctttccctctcaggctaatctctcaaaaggctttgaatcttaagttcaagtttactcaacctccacagacctagtacccttaaaaacagtggcttttcctttcaactgtttctgagcccaccatggaacttgaagtttgttgtgttgatggacatttcttctctgccactctgtctcctaagtagtgcagcgaaatgttgtaaaaggcatttactttgagaaaattatccacatacttgttacagtaggaggaattctggtccagcttttattgtgtttacattttttttgacttgcaaaatgtgttttattggataaagagatagcgaatgagtcacctggggaaatagtcccatgggcaagtcgtctgtacaagccaagctaaggtttgcatgtgcgcttttgactttgaatctctcatgaataaggtgtacacacgcagatggattgagctcctatcagtctattaggctcattacacagggcaagcaaagcacaaagccctttccatgacgtagggctttgctagctaaggcaggagatgaagcgtcctggggaagctaggaaaaccagaaagtcacctgtcagtccaaggggctattagttgtatgtgtgagaatgtatcagtttggaggcagtttctcatgcagtccaccctggccttgaactcttaatgtagcagaacttgactttgtactctggagtggttcacctctatctcccaagccctgggattacaaacttgtgccaccaaactcaactgtcaggtttttgggtttttttttttgtttttttttttttttaagacagtgtaaattgcatctttatttatttatttatttatttaaaaaagcatcggttgtgattaacttttaagcactcatattttattgcaatttttaaagtctcctttgactcctctctaatgaaattttttttgtgtgggggggtcatggttttgccaatactcttattgaaatcacttgcctaaagtactggcaattaaggccgtttcttgtacactaagccaaatgaactgaaagatagagggtgtaaaaacttatagcttgtctgtctggctcatgctatcctccccccccnnnnnnnnnnnnnnnnnnnnnnnnnnnnnnnnnnnnnnnnnnnnnnnnnnnnnnnnnnnnnnnnnnnnnnnnnnnnnnnnnnnnnnnnnnnnnnnnnnnnnnnnnnnnnnnnnnnnnnnnnnnnnnnnnnnnnnnnnnnnnnccattttctggagaaacgtgcaccgagtacaagcttactaaagaaaaaaaaatcgtaaaaacagcactttgttctgccactattgtataccttaaagtaaatcaaatatatacccataagcacctgtagtcaaaacagttctcaggttaatgatcacctgggggagaattgaaatcataggcgcctggccaaagggtcaggaggctctgccagtgggtgttgtgaggagttacaggcggggtgtctggccagcagttcagcctttgcccctttccttcttcctggaatgcctctgtagtcctgacaaactgggcttatcccaggaggacccagctgccttcattctctgggggcattgcgtgactgtgttcagtttttcctctttgaggaagacgccatgaaactcaactagatagcagtgtcgggactcccaccttgtgctctgccaccaagtcacaattctgtccccctcccacatacgccccctgacctcccctgggccaccttccaccttgggtctggagagagaattacttgggctaagtccacaggcaggctctatctgactctatttacagcaggagttttattttaggtagcttcaggcttctttttagaactgcttgcagcactgaaaggcagcgcaagagaaaattcctggcacctgtctgtttcggttttaaatctgcattgtgcaaacagcagtgacattcaatgccgatattgctagcagtcctattgttaccaagagcggaacaagagtgctggaactgcagttgactgtcacttcaggcacgccttttagctttgcttgttttctcatctgcaaaatggggccgagaaggacactcgagcggttgtaagggttcacgtcaaattccccagaattgtgcttggcacaccccaagcacagagtcggggtaattgagaagcgtggtgctacatacttttgtgagtgtaattgcctttaaccttcataatgacctgggaaggtataggtctgtttccatcggcctcatatgatgacggagggaggagctatagttacatatctagtcatggaccagggcagccgctgttagctgtaactcataattcacccttccggccatgaatttaaagtactactgttgcttcctcaccagaagaagcactttcggggcctctccctcagttcacacctcccatggctccccttcagtccctctccactgtagtcatgcagggaaccaacacactgccctcttctgggtagtggggatctctttcttagtccataaataacatggctcttagtcctagctctctccatcgtgaccctcacagtctagaagggctgctgggggtgggctggggtaggtctctccactcctcttcttggtgtgctcagggacacccagtgttgtaactgctttgcagtccgtctcttaactgtgtcacctgggtgtgtactcactagccccttagggcttgcaggcaggaattacagcctccacaccctacttacccacactggctacccagcccgaagtgtgtgtggcagcaggcagcacatttggcttaacttgttggtttggaaatcaattgagatattagatgcctgtaacattgggcccatcttttctgtccttctttacctgaggttacttggtgtctccaccactctgtacacaaacataggctgtttgctaggattggggtcatagttcgtaacttccaggattttgaaaggtagacagattttcaactaatgattcttgttttataaaagactgtataagttgaggtgggacgtctgtgcaaggttctgagttatcccattaacggggggggggggggggggggagggaaggattacacatggtggtgtgggctgccccacccagagtcttctttgtcttaactatagatacttttgttgctgccccccactgtctgaccactaattttatcacaggatggcaatgcacaagtagataaatatcatcttgatttttttttaagtgcaatttgaagataaccattatttctgcttcccaatcaggttttccaaatcctgtcctttgtaaaaggtggacagagtaaggcagcagagctggagggcctttcagagagtctgtttgtctctttcccatcaggcctgcaggttagaaggttaaaaaaaaataaagaacctatttttaagccattgcccattaaatagtcagggatttctatttgtcaagcatcagaaacaattttatttgagtagatgagaatttctcagtatgtttgccagagaaagaaaatctactttcagtgagtgggcttgtagacaggttaaaaaactggagcaaaataagtcctctcaagggaatgatggacagttgcttacgattttgcatgaaaacaagttttgtaatttcttcacagaattccgttatgctttttttttttggtgggggaggggagtataccatattctattagcttagcgcttatatcataaaattgtctaggttatctgaaagtaatagtttgttgataatgacatacctgataatcttaactctgtgaatctgggtgggcaggtgtttcattcatctaaagagaatgggaggcatgatttaatgaaaggggaaacatctgtcaaaactccaaattgacttcagaagaggcacacgggcacttccacatgcttcaggctgccgggtgttctggagtcctggggacaatttgaggaagagcttgccagtcctctagatgtgacactcctcatgactctggatagaggctttacttatctccccagggaggagctaagttgttcggaattgtgtaatgggaggctcaggagagtgacacaggcaaagaggccaagagggatacaggtggcaggagctaagtttgtaggacacagaagcgcaggattccagaagcgatttgctcagggtccctttaattcactaatttattggcttcttaggtaaggtttcattttaatgaagtgctttggagaagcacatttgcatggtttaggtgcccggtcctgcacttggcaggcatgctgcccagttattattatggcttctttttgtgcaggtgtgtgggagccagacccactcacccctgtggctgctgtgaaggcagatccacaaaatactcatggggccagtgtaggcaggacactgcattgttgatattgcttctgtgggtaagctgcatcttacacctatgacaatctaaacccaaggagtccagaagtaagttatggtggtgttaaaaggggctggaactgagtttagattttacctcaggtgctgagtgtagtcatgttggagatacttagctctgacttcttgttgagtgagaatgtctgtagtaccctggttatcttgggttgatgtagacacagctcccagtagagtgtcatgtgatagctgtgataacagcctcatttaaatgggtttggcaggctagagaaagtgtgcagggtgtgcaggattgcaggcagagaggaaggcttgccccctcggcccagccaaggtctccctgagtcttgtcaccccaggatcaagtccccacccaaataaatgacttgtctgcgctctctcaatttttactgcacttcacctacactgcgtcattgctcaccttgactgctaaccttaactaaccgtctgcattgatcttcctggccatgtttggggcatctcagaaacagacatgctctccttgcaatccctgagtcataagagatctgggctttctttatgagactaagacccagagtcctgcagaggtctcaagattcttatgatagtggccgtggcagagcattttctgaagcctcaaggtcttctagggcgcgggggggggggggggctggttaaatggctacaatgaaaccactggggagaggggagactttccaggaacttacgttgaatacattggaaggaaaagaatttcaccccctactcccaagcctcggccccctcgaccgcttcctgttgctccgggttcttcaaaaactgaagctgacacggagcagcaaggtcagtatgatgagtggctggttacttaatgaccttttgattcattttcaatttttatttattttttaattgctaagaccttagtcatctttgagctaggatggctaggctttgggctgaagtcattttggcaaattgacctgaacaggtatatagtgtataaaagtttggtcagtcatttcatnnnnnnnnnnnnnnnnnnnnnnnnnnnnnnnnnnnnnnnnnnnnnnnnnnnnnnnnnnnnnnnnnnnnnnnnnnnnnnnnnnnnnnnnnnnnnnnnnnnnnnnnnnnnnnnnnnnnnnnnnnnnnnnnnnnnnnnnnnnnnnnnnnnnnnnnnnnnnnnnnnnnnnnnnnnnnnnnnnnnnnnnnnnnnnnnnnnnnnnnnnnnnnnnnnnnnnnnnnnnnnnnnnnnnnnnnnnnnnnnnnnnnnnnnnnnnnnnnnnnnnnnnnnnnnnnnnnnnnnnnnnnnnnnnnnnnnnnnnnnnnnnnnnnnnnnnnnnnnnnnnnnnnnnnnnnnnnnnnnnnnnnnnnnnnnnnnnnnnnnnnnnnnnnnnnnnnnnnnnnnnnnnnnnnnnnnnnnnnnnnnnnnnnnnnnnnnnnnnnnnnnnnnnnnnnnnnnnnnnnnnnnnnnnnnnnnnnnnnnnnnnnnnnnnnnnnnnnnnnnnnnnnnnnnnnnnnnnnnnnnnnnnnnnnnnnnnnnnnnnnnnnnnnnnnnnnnnnnnnnnnnnnnnnnnnnnnnnnnnnnnnnnnnnnnnnnnnnnnnnnnnnnnnnnnnnnnnnnnnnnnnnnnnnnnnnnnnnnnnnnnnnnnnnnnnnnnnnnnnnnnnnnnnnnnnnnnnnnnnnnnnnnnnnnnnnnnnnnnnnnnnnnnnnnnnnnnnnnnnnnnnnnnnnnnnnnnnnnnnnnnnnnnnnnnnnnnnnnnnnnnnnnnnnnnnnnnnnnnnnnnnnnnnnnnnnnnnnnnnnnnnnnnnnnnnnnnnnnnnnnnnnnnnnnnnnnnnnnnnnnnnnnnnnnnnnnnnnnnnnnnnnnnnnnnnnnnnnnnnnnnnnnnnnnnnnnnnnnnnnnnnnnnnnnnnnnnnnnnnnnnnnnnnnnnnnnnnnnnnnnnnnnnnnnnnnnnnnnnnnnnnnnnnnnnnnnnnnnnnnnnnnnnnnnnnnnnnnnnnnnnnnnnnnnnnnnnnnnnnnnnnnnnnnnnnnnnnnnnnnnnnnnnnnnnnnnnnnnnnnnnnnnnnnnnnnnnnnnnnnnnnnnnnnnnnnnnnnnnnnnnnnnnnnnnnnnnnnnnnnnnnnnnnnnnnnnnnnnnnnnnnnnnnnnnnnnnnnnnnnnnnnnnnnnnnnnnnnnnnnnnnnnnnnnnnnnnnnnnnnnnnnnnnnnnnnnnnnnnnnnnnnnnnnnnnnnnnnnnnnnnnnnnnnnnnnnnnnnnnnnnnnnnnnnnnnnnnnnnnnnnnnnnnnnnnnnnnnnnnnnnnnnnnnnnnnnnnnnnnnnnnnnnnnnnnnnnnnnnnnnnnnnnnnnnnnnnnnnnnnnnnnnnnnnnnnnnnnnnnnnnnnnnnnnnnnnnnnnnnnnnnnnnnnnnnnnnnnnnnnnnnnnnnnnnnnnnnnnnnnnnnnnnnnnnnnnnnnnnnnnnnctcctttctcaggagcccttaccaccattctctccccgtgcctgtcccccctgggcattgaggtcagactggaaattccgctactgcagcttctcctcagcgcccatgctgtgttcacttacacgtggggacttccatttcctgttggtgtatatttcaggtggccctcttgtcttcccaccccaggttcactgcttcctctttgtcttctgatggatggagactgccctgcttctttctatcctatgacatttgcttggtctcatctgtacccaggatcatgccacacattccattctgtctgcagattcctgcaatttgatgtgctctctctctctctctctcatacacacacacacacacacacacacacacacacccgaaccccatggcaatctctgtcagcgtctattgtggcatttacctaatgttttggttccttgtgtactagccttatctccgggacattgccacatactagcacttctacccctgtcccgcccagtgttcttagaaggcagggactgtcttactaattgtggttttgtatactgtgtcaagaattagcacaccggcccgtgtgtgtcgtctgccagattgattaaggacttgttgaatggggggtagaaattcaaatccacacagatggccgagtgtgacgtccattcataaaccttgtttttgctttgctaggtgaagctgagagtggagcgtggcagtaaaatcagacgacagatggacagtgtgacaggaacgtcagagaggattgggcctcgctgcgagagtcagcctggagtcaaggtgttgacaagttgctgagaaggacacgtgggaggacggtggcgcgcggagggagagccctgtcttcagtcaccccgttgatggaggacagatggacagcagccggacggccagtcacctctcttaaacctttggatagtggtcctttgtgctctgctggacacctgttggggattttagcccattctctgaactcactttctcttaaaacgtaaactcggacggcagtgtgcgagccagctcctctgtggcagggcactagagctgcagacatgagtgcagagggctaccagtacagagcactgtacgactacaagaaggagcgagaggaagacattgacctacacctgggggacatactgactgtgaataaaggctccttagtggcacttggattcagtgatggccaggaagcccggcctgaagatattggctggttaaatggctacaatgaaaccactggggagaggggagactttccaggaacttacgttgaatacattggaaggaaaagaatttcaccccctactcccaagcctcggccccctcgaccgcttcctgttgctccgggttcttcaaaaactgaagctgacacggagcagcaaggtcagtatgatgagtggctggttacttaatgaccttttgattcattttcaatttttatttattttttaattgctaagaccttagtcatctttgagctaggatggctaggctttgggctgaagtcattttggcaaattgacctgaacaggtatatagtgtataaaagtttggtcagtcatttcatgcctggaagtttgcttaagtttgtataaattgggagatggtgtctgagagccggttttgtgagtaccactaagctttctaactgcagtggccattgaattaacccctacagacaatccttataattcttcttgctttgggaaagcaaagggtaggtctaatagaagcctatgtgatggcagtgtggtttgtatggaaaaatgtagtcttaaagtgaccacagaactcagcagagaagaaaccattgtttttctaacctagactcggcctctcggcttcctctctaggcttgtagttagcataaaaggaaaggggtttctgttcccacaagggcagtgcagtaccattgtggcagcgatgcctgtagtctgcctggccttcccgagaagaaactcgggttcactgggtacttctcttaaatggaaaccacctccattcaaagtcctcaggctggaggggaggtagcccacacttgggcttgggcttgggcttgggcacagctgtttcttggtacgtttcttctattcagtttcttactgcggagagctttatgttcagcttcggtgttgtctcttctgtcagacgctgttgcttactagtaaatcttgggctgcacagggcgattctggaagggattctgataacacagcatcaggctttcccagatgaaggagcgactacgaataaagaggcgaggatctcaagggtgagagcgtccttttaacactaggcaacggaactgagaacagacctaagctacccccaaagggatatttggagaactttattctatatttaatgataacaaataatgtagattttaaaactgaactaaggaaaaaaatttttttttttgcatgcaaatcaaaaagctttgaatgtgtgcatgtgttctgggcacatgcactaagtagagtgtttctcccatattatagtttagcagactgaagataaacaggtcactttttttctccttcagataacatgttttctgacctgacttctctctctttttttttttttgtcgttgctttgaaagatttacgtacttttattttatgtctatgtgtgtgcgcctggctgtgtatatatgcaccacaggcatgcaggtgcccatatgtcagtagggggcatcggatgcctggaactgaaattacatgaagttgtgagttaccgtgtgggtgctgggtactgcacacaggtcttctgaaagagcagcaagtgctgtaattgtggaactctctctgtctctggccctccagcagcctcagctattgctgcttctgctgctgctgctgctgctgctgctgctgctgctgctgctgctgctgcttcttcttcttcttcttcttcttcttcttcttcttcttcttcttctccttctccttctccttctgcttctgcttcttctccttctgcttctccttctccttctccttctcttctccttccccttctcctcctcctcctccttctccttcttttctgttaaacttagaaacagttaaataggttcatttaagaaaaagaaaaaaaaaatgacttcattgaacccaaaatataaagggttgcagaaccataaaaaaaaaaaatagctcagttaaattagagatgattcataaggtggggttgtgggtgccaggtcataattactgacaaaaaagactttgtgaaattgcttctaaacaaagttgcatgtgatagctgccatccggtgggagtttactcagctgtcatacccagtcaagggacaggtctaacaggcacaggactttcttttttgtaaggtgctgcgtgtttcttgtgttttctttctatcacttttcagcagtgagtttttttttttttttaacagccttttctttttttggtatgtggggaaaagggaaaaataaaaataaaaaaattcagtaggcttcaagaagagacccatgataatgtatgtgcaaatatggggggaaaagggcgcctgaatataagtgagagatttgaaatagctgaaagatcgggaaaccagtggaaggaggggtccccagggggggcactgtcctcgacattcattagatactccaggaacattagcctcatattctcactgaaatatgatgcttgtgacatacgtgtgagatcagcagctcccatgtaggtgcagatgcagctttcttttgcccgagtaagtatttgtttccaaaatgtttgtagtggaaacttgtgtggcagcaagaaaagggagttctttttcttgctttactcctcctaggtaacaatttcttccctccattgattgtgtattcttttgagttctttggttttctgcttctcatccataagactacttactcttcaagccccaagagctgtgtgcattctctctttggggtccctggacaccaggcaccctgttaatgggcagtggtgtaacattggaccagtatgcatggtaaacttgtttcttttatcctgttgattctccataccccgagcatcccttgttttcttcctcatgtttaacaggtgggtttaatcctgggctcacgtcatccctcctcttctgcctcttctgtacccgtgactacagttgggtaccacagctctggcccaaagtagactcttatgagcggttcctccttatgcaatagaatcaacctttttctttctttgtgctgcgtgcatttagaaggaagactatggagtatagttatggcgttggagaaactagcatttgaacagggacaaagcaggcactgttacacagctaagccagtgagtgccaagttcatggtaaatggcaggcaacaacaaaacagtgcagtgcaacctatgtgagcatccgattaagcaactcctctcgggaatcgctctaccaatacattttgcatgcagttgtctagagcaccctaccctgcacattgaataagtttatttcttggatgatcttggactggggggacatcacattcagtaaatacagatgggggggggatgtcctactttgtgctagaaagcaaaagcaggaggtgaaatgacatttttcgttttttcccctcttcctttacggctgtgttctgttctcttagctccagttattcctccctaggtccccagagttgctgatccctctcctcctctcactgaagctggctcatggtgcgctgtgctagaggaggagtctaggttccctgtgagccaactgtgcagcgcagtgctctagtgtgttgtcaagtgagtcaaggcctaggctcctccagttacagtgcatgtggctgaagtgagccacttgctctgtgtgtcacgtgcgggcgcacaggctgaatggctcagccaccatgccttatttgctctttgcttcactcacctgggaggcaccctgtggctttgcccttcagcattgcttgctgggcctccagactgcttgcttatcttcagcctcagcccttgggacaggtcgttctgctgctgggaaaatgggtgaagctgatagggagtagaaggtgtgtcctatcagcaggtgacctggggcacagattttattattggtagtggcctccttacctcctcacccccttttatgactttctctttgcaggagggccacggtgttcaaaaatgaggcttcctgttttatttcacattcttgtaacctaatatcccattcgagcatctttggagacagctttttctttgttttgttggactgtgcaagatgtatcttccacacggagacatacatccatgatctggaccctctgtcttagcagttggataagcacattctgtcgtacacacaaccttcctttgttggaggtctcccatttcctttcctatacaaggaattgaaccactgtacgcaaggaacgtctgtaggggtgagaaagataaatacactcttcttctgcaggagatgtccatggaacacattgtgatcctcccgttgaagttcagctgtagctggctatttaatcttgtgagctgctgaccaagagagtttgtgtaaagcattaaaatctgccaacccgaggggccacttgggcacccaagtttatataaaccttcggcatgccttatgcacccatgaccctgaggactcctgacagccggtcccagctggttttacaatataaaacaaaactcagacattggctcaaactgttctacattttgatccaaatcccttctaaacacaagaagaaaagagcctgtgccctgcgtctgttttcgtggtctccccaggcatgctatctttatatttttttcacaccctagcttttgagtgtccctgcaatgcttgttactcctcgactagaaagccaggctgcaataaatcagtgactgcgccacacagaggtcacagaagctagagagagacctgatcccaaattacactccttggtggggtgccatggtctcaatgcatgagtctctgcaggagacggtagaccaagatgtattcctgtttgtgggaattctgtttgcaaatatgccttttcttaccgttctccacctcctctcctcctttcaagggaagctttgccaggaagctggagggctgtctcaccatctgactttgggtggcattcacctgttctgcattctgtaatcatggctctctgtggagaaatcagaacaaggtgctggacccatgatgggagggttcttaaacctccactctctgcttctaggtagccagaaaaagcttgaatgtttgccttccatgttttcctaggaaacagcatgtatttccgaaagatgactagtgtaatcgactcatcacaattgttgttgtttttgtagttattttagtggccatggtgatagcactgtactgagaatcaaacccaggaccttgtgcatgtgaagcaagtactaggcacctagcccacatatgtagctctttttctgtttggtgtttgagatacaatttcaccatgtaacgaaagggctggcctggaactcactgaagagaccagtgtggtttttgaagtcacagggatctgtcttcctctgccattggagtgccaggattaaaaggagaaaggaattccagagaacaatctgcatatccatttgtaaaaggcaatccagaagaagcgaaagggctgtctctccttcactccctttcagccctcttctgaagcaacctttaggaactgacagagccctctggctactgagtcaaggatgccttgggctatgcggaaatgagacacaccaccttctcctgggcattattcacagggaaaggccagagctttacaggatcgatggccaaggcaggcagcttggtttccttggtttcctttcgttctggatttatttctatctttttattatagataatagttctgtgggtacgtgctagtgacctcgaagttccctgtaggtggagttacagatggctgtgagctgcctgccatgggtcctgggaactgaactctggtcctctgaaagagcagtacatgctcttaatcattgagtcatctctctagctccacattttatttttcccttaagtgaaatgcagtaacccctggctggcgcttggttacccgaggtcaacagagatctgaaaatattactgtacaactaggcatttgtgggagagagaggcagagaccatatttccatgatgtttttttttttttactacggtatattgtgattattgtatgtattaattgtttatacaccatgctcctatcacagatgtgtatgtataggaagaaaatggaatatatagagaaggatactatttgtgtatttaggtgcctactaagggtcttagaactactgtattccagtatattctatgttaaattttttgacatagcattttggggtgtgtgtgtgtgtgtgtgtgtgtgtttgcaaagtgtgtgaatgaccacaggccttacctgttcagtgtgaatgaagctacctcccttcaaacaagttatttaagccaaaatctcatgttttctaccactaatgattgaattaatgttatctccctaagttttctttgtcataaggataaagccctgtggactataactttagtttagagtctttggtaagcttggtgtctagtctggtttctaggtgaatgtatgtatttttgtccaaaagggattagtaaacatgtcttcagtacagccacacttgggaaaataaacattagaaaatttgaaagtcaacaacacatggtgccttgcatctgctaagttgtatcccaaaaggagaaaattttgtacctgtggcaaatttgcatgccaagtgtgcatgtcatttgcatattcgtattttagttagtaacgaacaaacagaaagtaaatgttagctgtgcagctggctgttgtttctaggtctatgtatatttttttgttgctgacagattgccataggaaaagatgtaaaatgggcagaagcccgagatgggggtaggggtggggtcacttggtatggtagctggacgtaggaacaccattgtttcatacgctgtactgaatgctttcatgtcttagtttaatttatactatttaatatcaagacaatcttcaggcttttaataaaacaaatctaaatagagaccaacaagattaagtaaaaattgcttttattccagtaactactatccaattgccctcaatttaacaaaatagtattagaatgctttataaaggttttttgtttgtttgtttgggtttttttggttttgtttatttgtttgtttttggttttgttttgttttggcttttgagacaaagattttctgtgtagcctagctgtcctggaactcactttgccaacttggaactcactttcttgactaggctgaccttgaactcagagatctgcttgcctctgccaccagagtgctgggattagaggagtgagctaccacttacaaagtatttctatttatcattatttatctctgaagtatccttacttatctttattctactactgtagcagtataaacagtgttaaggagcaatcttgtaactaaaagtcaaattcaacgtacattgttaaaatgcaactttgtattagaaagagaaacaagtgacagaacctcccactttctcctggtggcactatgccactgccaccacatcgcctgggcatcattttaaggaatactttctcttcactttgcttagagatagatgttggcaatcttcttgattcatccatcttacctgttctcagctactggcatgcattatgcaaggcctagatcattctgtcctgccacagtttgatgcatattgaagttattgtagaagacttcctgtaatttgttgatcaactctgatatccaggccagaaaggaatattggcatgcttgaaatatcagttctttctgatatgctatttaggcctgaaactgccttgcctctccaaatattccttaaccactttaataccaataaacactaattgtaaaatgaacagttcaatattggctctgtttttgtttcaacctctgaatttttactgctaagaactattagagaactaactcccctagcccccaaggataagttctttcccctctaatagtccagcagcactaccctgaatgcctggatgcggagaaaagagagtttatgtgaaggactgacttaggatctgctcaggagcttctggcaattataggaaccattactaataaagtgtccagttggtactttttttgccaatctataggatacactttcttaagacatagttcaccacggtgtaacaattgctgtccattcattggtgggcacttggcagttgctgactcttcagggttcatgagcaaatgaaatggtgtccgtggaatgccttctcaccctgtgctgcctctggagtcctccttgtcctgaggatttcatggatatctgaattatagtctccaggatcggtaaagaatgatagtcataatgtgttcctttggattctgaggttttgcttattcagacttcacatctgttgaagaggtaacattttcatattaggcaggactgtcctgaagctagttcctgtcttttatggacattatctgggttgaactttctgctcaacaggaaaacgactaatactggtctcagcaaaaaagaagctatcttatttgatttgataaaatgcaattttcaaaattatttaaaggtgcagagaaggtactattttttgatattaggtatatcatgagatgtgaacttttaagctattgtgactgcattcagtgctgctggctttaattctactacagttttaaaaaaatggagtctttcttttgttttctggtgctgggacttgaactgagagccttgtggatgctaagcagacaccccactccactgtgctccaccccaaccctttgatgtctattttaattaaatgcacgaagattgcttcttcactaaacaatccacttgaacttttgctatctcttgctcgtctctgtcctaactttataaccacataggtgggtatttgtgtcactgttaaacttgatatgtatgattatttttaaatataacacttaaactttatgtgctcgtatagtatgcacagatttaaagcaatttccatcaataacaagctttactaggtttttttttttttttggcgttcaaagttcattttctttttcttttaattaggtattttcttcatttacatttccaatgctaccccaaaagtcccccataccctcccctcccactcccctaccccccccccccccactcccacttcttggccctggcgttcccctgtactgaggcatataaagtttgcaagaccaaggggcctttcttcccaatgatggccaactaggccatcttctgctacatatgcagctagagacacgagctctgggggggggggggggggcactggttagttcatattgttgttccacctatagggttgcagacccctttagctccttgagtattttctctagctcccccactgggggccctgtgatctacccaatagctgactatgagcatccacttctgtgtttgctagaccccagcatagcctcacaagagacagctatatcagggtcctttcagcaaaatcttgctagtgtgtgcaatggtgtcagtgtttggaggctgattatgggatggattcccgggtattgcagtctctagatggtccatcctttcgtctcagctccaaactttatctctgtaactccttccatgggtgttttggtcccaattctaagaaggggcacagtgtccacactttggtctttgttcttgagtttcatgtgttttgcaagttgtatcttgtatcttgggtattctaaatttctgggctaatatcccatttatcagtgagtatatatcatgtgagttcttttgtgactgggttacctcactcaggatgatgccctccagatccatccatttgcctaggaatttcataaattcattctttttaatagctgagtagtactccattgtgtaaatgtaccacattttctgtatccattcctctgttgaggggcatctgggttctttccagcttctggctattacaaataaggctgctatgaacataggggagcatgtgtccttcttaccggttggaacatcttctggatatatgcccaggagaggtattgcgggatcctctggtagtactatgaccaattttctgaggaaccgccagactgatttccaaagtggttgtacaagcttgcaatcccaccaacaatggaggagtgttcctctttttccacatcctcaccagcatctgctatcacctgaatttttgatcttagccattctggctggtgtgaggtggaatctcatcctgatgattaaggatgctgaacattttttcaggtgtttctcagccattcggtattcctcaggtgagaattctttgtttagctctgagccccattttttaatggggttatttgattttctggagtcccaccttcttattttaaaggcggccccaaaatgaatatttttgaaagaaacgtatttaaagagcccagaacactgatgtttatctaattccaaggaatgaatatgaaacagatatgtttagaataaatgattactgtcccataccttctcataagtatatttactggaaacgtttttatttttaacttgaaccttacaattctgtagacacgagtgtccgccagcctcctgctgggcgttttatagccatttctcatcagctactcactcatcctttcacagggagcttcttagaacccctttgagatatagcgtaagccagactctgatgccatagcccaggagcctttgctgatttggagagccacgtggagcatggtggcagccacagcgtggatcttggcttactgtcccctctcacgtacgggcagctgacgtcttcatagatacctgttttatctgttaggcattagtcattctattcacccagctgcaaagaacttaccttcatagtatatatatgactcttttctgacttatacatcaaaggcggatggggcttcaaaaggaagaccatgttttgggtatatgcctatgtataccccacccccatactaggatatatgtaccccggtctgatagttcacaagttatagacttataaacataccccacacacccacctctgttatttttgacgatgctaggtgctgcttcacatgcctctgagtttcagcttttcatatttcaggctcatagccttcccattagaatgaaacacagtctgggcctgccctgcttcaaagccaaaatcccgaggatagccagtccaagagctgtgtgttttggcgtgggaagaccggttgcttaaagtctgtacctatgagagctctcacgttgactcaaatgaatccggagccttgttccctgaattatgtcaaggttagcagtcaatgctgctttagaggactgagtaaattgctgaattcctgtgaatgtcaaactctatttctcagcagagtcggccactgccaagtttgtaatgtacacactgtgttctgttccctgaactccaaggatggggtgggggtggggtgggggggggatagagggcttgcatagggcacaggtgaattttatttctagggacttaccatgacaatgtgacactactggtaaagtctctgaagtactgggcaccaggaagacttcttgaatactttgactctcactttttttttccttcttcaatagaaaaaaaaatattatgtaaaaagtttcctgagtttataaagccctaaccggtggctctggcatagcttgttaagagtctccaagaggacctctcttcccaccaccgtcataagaggcaagaacaaaaacgcattcttggtgattccaggaatcagatctaattggaaagcctgcctattgtgaacacagtggatccagttttaaatacacaacagagtgaggtttgacttcttcaaagtagtcaggtagccccacgacccccctgtctctgttttgtcactgggggtgtttctcccctcttctttatctctccaacccatatctttcttcagtgggaggtaatacttcagataataattaagtcatgggtgactgctcaaacctgcaattccagctctcaggagacaaggctcagggattccaagttcaaggccagcctaggttacctgatgagatcctgcccaagaagcgaagaagcaaacacataaatacattccctatattaagcagggaggggtggggcagtggggtcgaagaaaagtgctagaggttgctccgaaagatactagctgagtgaggtttcatgcattctgggctattggtcattcagggcctcagacagccaaactaacatcaggaaaggagtttttcctttcacattagcacaactacattgaaaggagaaccagtttgggcattgcctggcaactgttggtttcagtctgtatctgactttagacttgaacccaggacctaagctggtgtgcaggatgggcaatccgaatgtctgtgagagatcttactcactgataaacaggaaaaccctcccaggcatacaggaaactgttgttttgtacgtccaaggacttgaaaggcaagagaagcttcttgaagtgagtgtttcaagcttgcctgcccagagtggacagaaagcagctgggtgattccgagctgaagagatgaggacggggtaagatggacagggagttattaaagaaactaaatgtgtactagacgtagccagcaaaaaaaggagaatggtcagtgttaaaaataagatctgtactgagcaggatacaagaagaaagagtttgtcgaatccagagaaaaagtctgaatggaaaggagccgggggagagtcagagacgtggtgaaaacttcaggtgtctgtgaacagggactcatttcaagtgacacttggtgacatggctgaagcagcttcagaaagaactgtgtgtgtagacctgaacccgctctccgccgttcccacgtgatgtcaccgtaaagccacctctagatatgttttaggaaaaaaaatagattataagaataatattagagttctttgccaaaataagtaacaaggtgtttgttaccaagcaacaaagttgccttccatctttagcagtctgtgtgggaagctggtgagcttcaacccaggtttgagaagaaatgatggggactagggtgatgagctgactccttatactttctactggctgcatttactcaggacaacacagcaaacctttcatgtcactcgggggtggggctcaaaagttccattttcatccttaagttcacaactagagcatatgctaaaagaaatttgaatttaagaactaattgttacatacatacagagtgcatcttccaaaatcctagagctaccatgatataccaaaagtatatcaatgtggatggaaaatgcttacttggcataaaaaatttaaagatatatatctgtgtgtacacacataaacctaaagctagctttacacctgcctttgcatgttgcatatatttcaggttctctgctaacacctatttgtgtgttagctacttacttttcatgataactctatgatagtgactttatccatacacccgttgtaaagtcaaagtgtagttaaatccccaagttacacagccagtaggaaagctgagatttgaccttatagtgctctcaagcagatatagcatgctaacaagagctggtagataatcatgttatatcgtgtgactcactcactcctgttcggccagggtgtgtcccggagccaaagacagatgacacccccacccccatctcccacccctaccctcttgctttgcagtgacctatggtctgccaagacaaaaggagctcaacaaaatggatgtttcctgtttcaggaaatagacgcaagaaaaactaatgtatgaagcagacatgagtgtcatttttccttctatcaaaagatcgccaggtcagcaagctaggaaaaagtgattgattttaaagagagtttatcccctccgcatgttggagccttgcttttggtgtgtgtgtgtgtgtgtgtgtgtgcgcgtgtgtgtgtgtgtgtgcgagcgcgtgtgtgtgtgtgtgtgtgtgtgtgtgtgtgtgtgtgtgtgtgtgtgtgtgtgagagagagagagagagagagagagagagaggccagaggacaaggtcaggtgacattctaggaactccctctccactgagacaggctctctcagtggccaggaagtatgacgtttaggctaggctggttgatcagtgagtaccgaagctctgcctctctctgcctccctaggattgggattacaggtgtgagccaccgtgaccagcatttttatgtgggttctgaggatcaaacccatgtctttatccttaaatggacagcactgtagtgactgagccttccaccctcagcccaaacctgtgcattttatgagattgatgaaaatattaactgttaaattaacctctatttgacttacggttctcaatgttatatatcacacatataagccatataaacttgtttctatacaaattattatgtacttatatgtaatatatataaaattgtatttacataaaaagatctgatagtacagcatgcatataatgtcataggaaaagctttgctgggataattattcaaatatgcctttctaatggaactacttgatggttccagcaggctgtaacttgctactgtaacttgtaacagccttcaagttaggagttttatggacagttacattgtaactgtcacttgtggtctaatcttccccttaagggaagcttgagaaacactgtcagctttttcgagtagaggaagtttaaacatattggcgcagagtcttcaaaattgtttagcttaaactnnnnnnnnnnnnnnnnnnnnnnnnnnnnnnnnnnnnnnnnnnnnnnnnnnnnnnnnnnnnnnnnnnnnnnnnnnnnnnnnnnnnnnnnnnnnnnnnnnnnnnnnnnnnnnnnnnnnnnnnnnnnnnnnnnnnnnnnnnnnnnnnnnnnnnnnnnnnnnnnnnnnnnnnnnnnnnnnnnnnnnnnnnnnnnnnnnnnnnnnnnnnnnnnnnnnnnnnnnnnnnnnnnnnnnnnnnnnnnnnnnnnnnnnnnnnnnnnnnnnnnnnnnnnnnnnnnnnnnnnnnnnnnnnnnnnnnnnnnnnnnnnnnnnnnnnnnnnnnnnnnnnnnnnnnnnnnnnnnnnnnnnnnnnnnnnnnnnnnnnnnnnnnnnnnnnnnnnnnnnnnnnnnnnnnnnnnnnnnnnnnnnnnnnnnnnnnnnnnnnnnnnnnnnnnnnnnnnnnnnnnnnnnnnnnnnnnnnnnnnnnnnnnnnnnnnnnnnnnnnnnnnnnnnnnnnnnnnnnnnnnnnnnnnnnnnnnnnnnnnnnnnnnnnnnnnnnnnnnnnnnnnnnnnnnnnnnnnccacccccttttcgcagttcccacctggctccttcctttcctctctttcttctcccatcctatgcttgcagagtccactctgagaggctggtgtctttcacatacctcacaaaggatgggttggtttcacaaccaactttcccgatgatgtagtaccagtgtcccgcctcacctctcaggcagccctgcttgtccatttgctctggtttctacttagatgatatcctgcccctggattcagtagttctttgagggtccatcttttatcaacatcggaaaccgtgcttagttcacatgtgcaagtgttgtgaattttacatcctatcacttacaattagtacctttttgagttcgctctcacatctcatgtgtaatttcctaagagaagaaaggagggctagttgatagtggttgtaaactcttttgacatgagggtaaaagtattttgtttatagaggacagaaaaggagttaatatttagcgactgtgctgaaggcgggacaggacctaaggaatgtggccacctgaccctggacctcccatctgtgcatgtgcacctggataattacacaggttttcgatttgctagaaaggttgtatttgtgactttaatttacattttcgtttttagttcataatcctagattccacatttctctaagaggaaaggccctgctcagacacggaaaaaaagtcagcttcaatgtggctgtttggaagtttgcagaaataggtggagtgtatgtggtgggctggacaccagctactgcgctcttgtgcacctactaatcctgattgcaggttgaggcttaggaaaagaaactagaccagggtcaagcacagctggtggtcattcagtcctcacagtggtctcacttctgagtgtgtgcgtctcagtaccaccctcaaccttcaaagagccaggctggaggaccaggacctcttgtcggtcatcctcgtgcattaagaaacagcagtgtctaaaccataggcttaataaacacagttttgaatttctctactttgcttaacacttcttttatctcaaagtaatttacaaataccacaggtcacgtgctagacagatggatgctgtttgtgtcagactcatgtacttggagcatgaattaaatcaaagacccacaggagatcactggtatactcatttcttttgaaattttatcttaattaactttttattatatagggtatgacaaggctagttccatacatgtattcaatgtgcatgggacaaatttcccagcatcccccactacagccccaggtatttgttttcatgagacccatccagttctttcaaggtttctttgtgagattttgcatgttagagcagtgaccctatttacttagcaaaggtactattagttcattattagttctgtaacttggatttgaagtccttcataaccaccgcagtcttgaagagcatttgtgctttatctgactggctagggaaaaagttcagtcttaccaaaaagaactgttctgagctcttgggtcagggtgtgaatgtttttcatgtgactttcagttgggtcttgctcagagaacgtagtggtcaaagttgggttcacatcttgggcataatttgcaaaagtgaagtttgtaggtgcagggtggttccgtgaagacatgaagatgaatggacgtaatgtttatctttgaagtcctgtttccagaggacactggggcaaggaacaaacgctcttctgttctgaagcatcccagtgttttcccacgttgggtccacgagactgagtagagggctttgagatgccatagctccaggatacattgttccctcctttttaggaatcgggtatccccagtactggggtcaggctcctcatcacgcctctgaggtaggaagtgcacggagcccaggcttacccacaaagccaagccacagctgagcatttcccactgtggaaagtccttcctgtgtttgtcacccatggactcagcccttagtgtctgggtcagttgaatgcctatccagggaaagccagtggtttggcagagaaaactggatctaagtgggaataaaatttgttgacctctgcctcagagggtcacatttttcatttatatttcacacgagtcatcataaattacagtgcttatagataaagaagacttcctccttcctccctctccagacaccacataatggaaattgcaagtttctacagaaaggccgatactgctgcctcctcctcttcttcctcctcttcctcttcctcctcctctttctccccctcctttttttttttttttttttttttttttgtaaactaaacaaaatgtcagtctctgatgagacttgcttcctgccagaattcccactggtctactgtcacagtttccacaaagggccaagatgaaggagggaaacccattttgaaccctgtgctcttctgtattatgggaaagctgctttctgcctcaggatggggagaactgttaagttctaaaccttagtgataggcacgtaagacctactggattctaactgctgaaggagaatgtcgattaaggcaagatttgttctgctgctgcgatcagacatataaaactttgcaaagttttgttgttcatttcctgtttaagaaaaaaaaaatcaccctgtcctatgaactcccagaagatgagaagattttcctcagagaaaattcagttctgggaagagccctccatagaggtcataacctacaaaattcttgaagggaagtttcagtgagaagagggcagggacggttgggaagctctgagtgctgcagtgggtgactggtgtgtgagcccctgctttcttgagctgcagccttcatgggacgtgtaacacacatctgcagaaattttgggggaaattaaaaaaaagaaaaagaaaaagaaagaacaacatgaagttgggagaagtgtagtggaggcgaggaaagagtggactttgatcaatgtatatgcaggtataactattaaataaaatattaaaaaatagatttctgtttccagcacagggcaggaatagcctagctaagtaggagtttgcaccagtagttgtatctttcccaaatgactgctggagaaaataagtgtaagccattgtcaacaggttgtggaagagactggttcagcatgctcgctaccaaaaactcgccttgctgcgaggctggccccagccccagccttccacataaagcaggtgctgttcggatcagaggctgatcatccttggcacccagagtggacagcctgccaattgttgcacaatcgagtggacccaagcgacaaaggactgcttaattgaaagtgtataaaatggttccttagttgaaccttagtgggtcacacccttaatcccagcactggggaggcagaggcaaatgactctctgagtttgaggccagcctgttctatagagtgagttccaggacagccagggtcacacagagaaaacttgtctcaacctccctctgccgtcaaataaaatggtttcttaggcttcatggacaattgagtaaccccataaccccagtttcctttctttatggtcactacctaatcctctgggatcaagcataaaatattctggtctcttacagtgaaaagattaaacagctgaagtttaaattaaatcattaatttggagttttctgtgactacattcattatattctctgttgggattacgttcctgtggatttgacagatacataaaagtgacaatatgtgcttatcaagggcaaataaaagttctgcacgctgaaatcctgagtggtgtttttagttttctgtttatattaaaaccttttaaaattgaaatgatttaacgaggttttctttttctggatacctagtagaagaaaaaatcagaagcatgaagcaattgagtatatttacgtggagacaggcctgagtgatggaaattttttttttttctttcagtaggatttagcagaaagcatgtgtcgaaagtcttacctaaatgggtcataattaaagacgttggggcttatttattttaattagaaatattaagctacactcagtgggcttcatggaaaaaatttttttctaattgcatattttattttacgtcaagtaataaattaaatttttgtgggtaccaaaaagacgttttagctttaaccacaatcataactcatgctaaatatattaatgttgtgttgattagctggctaactgtttctggagagttaactggtgagacctattgttgttgatgtttttcgttttccagtaatagtggcagagcaatcagtgtcctttctggagaaaggttctcgtttgagttgctctgatcaatacaggtgactagaagcagaggtaaagagcagcgcttacttctgctgtgttctctttaaaactctgtcagatgctgttgttgcgttgcccctcccgtgggtttgacagagtttctgggaaatccacagaggcaactctctcagcctcttacgaaaaggggcagaatggaagggggaactcactcacagttcctgtcgggattaaaccgggcatccaagtggcgcgcctcaggttgactctcagacctagctgctgtctctgggatggaagatcccatctcaacatcctccatgtatagcacagaacaatccttgttacccatctcgttttctcgccaaagagaatctgtagaacaaagcaatttagactactcaagtacattggccattcccagttgtctttgacagttcttaattagagtaaaaacggacacagtcagcagtaggaacagtttttcgggacatttgggaatttgtacaaatatactttagaggaaaaaaaaaaaaaaagaaagacaaactgtttggcttctgcatcatttattatgtgtgcgcccttgaatctggtgtaaagtgcctgggatgaagattggtttctgctattgtacagccaaaggggtagccattgcactatggtctcagttacatggtgaacttgtaaataagtcaggcattaaaaacttccagtggcatccttggctgagagtccgtcttagtcactgtgaagtatttgctgcatgacctaaagatggtaccataacatacatagccttggctttctcatctgtaaaatgggatcgatggccaggaatgagctgtgtgggagctctctcagacacacctccactcccagaagaccccaggacctaaggctcattgatgataattctcaaaacagaaaggacacattgaacacacacacacacacacacacacacacacacacacactcagtgtttcttagacttaagtgatatgtttgaacctgacgaaaatgaaaggaattgagattgcccggccacaggaaatagaggccaagggccaagttaaacagctgaaaccacgcacaaagcaggagatcatgggagatagcaaacgcttcgacgctctctttgtcggtgtttgagggagaaatgacagcagaattgtcatgtttagaccagctgcctcttctacctcacctgagagttctcctcctcgtccgtggaaggcagacaggaccagctgtgttctgtggcaaaatgcgtttttctccacagctcggtgctttcccaggcgcaggcaccctggaacctggaatggtttcgtttcttagcacagagttttcatttaacatggaacattgttgcttgaatgatgctcattaggagtctctactcatgttttcctttgcctgcttcaatagtatctagttctgttttctgtttgtttcttgttttgttttccaagactgttcttctttagtcctaggagactaatactttacacacacacacacacacacacacccaagctgacctctaaactcatgataatcctcctgcctcagcttctctagagctagaattataagtataggcaatcaggcccaactgtttgtgccacttaggtataaaccattccagggtcatggatctgttaggcagagtttagttgactccatactgtatcttcagagggcatagtactggcaaaaccatacccagagctgcagttcacttctgctttgtccatttagtgtgtccatttcctctttgaggaaaacctttggtttttcagaactccattttcctttacaaagtcagagttgcaatagcaaaataacttaaaaatattttgttttcttgctcactaattcattatgaaatagctcaatgcttaaaaggaaaaaaagaaaaaatgtgctgggtcttggtgggagggaggacatgcctgcctgcctgctctgaatctgattctcctgcccaatagaggttgccatctattggccaaagagagaaataaaatgaaaagttcggcccacgctccaggtggtgcgatggtcacggagaggttcttttggtaaagttcttggctaaaatatatgaaaatgcatgattctttaggaaccttaagcccaggatcattggccgtagccggtctctgtaagtcatgataggtatttaagaagtggctacatagctcttttaaatgcatatttcttgagaccaccagaattccattttaatgaaatattaaatggagttttaattagacaaattgatggctgattttgtaactctgtggttggtttgggctttctttcattccagcctttggaatctggtatttcctgcccagctgacatgagacaggctctgtagaacgggcaactggtggctcttggtgctgggatctggttaatttgaccatgtgcactatttagaggtttaagtagtggcatctctccagagttgtataatgtcataaggtgcatttgacaaaaaaagggaggtggttcgtggaaaattctcaagcaactgcaaacaggggaaagagttcctttggtcttgggtggacacacacacatactcacccactccacactccacacacacacacacacacacacacacacacacacacaaacacataggacagcttgaacttagaaagcaccagtataacaatttttattattaataacacatcattttaaattgacttctcatccctaatatctgaaaataatcttataaatcctgaaagctaaattgtatatacattagtgctttacttaatatgcctcaccatggtgtgtgtatgtgtgtgtgtggtgtatgtgtgtgtgcgtgtgtgtgtgtgtgtgtgtgtgtgtgtgtgtggtgtatgtgtgtgtgtatgtgtgtatgtatgtgtgtgtgttgggtagtatcctaaccaactatgaataaggctcacagtctaaccttgtggttttatttcttccttacctgcctgttcatatttggagtgtgaagcttttttaaatgctgtgtactacccaagtaatcatttgataccctggattcaggcatttgacgttcagttaattaattcctgtgccttccactgtgaactaagaacgatgacagctaaagaaggaggcggtacaagagaaaccaggaaacccatatgttatttgcttccattttcacatagtacacctatatatgtgtgaaacaaatatataaactgttacaaagcagcatattgatgaattgaaatgagtggagcatgatacgagcaagaagccggcaggagaacggttggagtggggcctagagaaagcagagtttttgaaggaagcgagacatgtttatgtgttctgatacaggtcagtattaggctcaccctgaatggcttaatgtcatgtgagcagtggggagaagagaaagggcagcatcatggaaatggttgaggcatgggcatctcctgtgggcaagccgagatgtattgttgaggtcaggctgtgtaacttccttctgaaaaggccctgcccatttaccagtcatgatacctttctttcacttctatttttgtcccttcctttaggaaaaggactagatgcttactcgttagttaaaactcaaagtcattttcctgttctggttgcttttgttcctcgagtttgagaagaatcgaattaggtccgcgtgaaacatttggtccctctgtcaagtttccattttcctattacctgatatgtctttctttttaaaatgctgtcccctctcatccaccagatctgtatcgtggtgcccctccttggtctttcccttttggataaaggcagatatactgagctttaaaattctgcctggatagattatctgctctggcacaaagtggccctgtcataaaacccagaattgaaacatccagtattgacgtctttaaattcagccttacttttaaataatactggactgggttgttggacatcatcataactaaactgtttctctagacgatgtaggttaatccagcaagcccttctaggaattctgttgcaactggtaccctgtactaccggactccattataaatgatttaacctcctataaagctgcattttaataggtgtttataggcatcacttaccaagtatttcaagggctctttaaatgaaaactgccagggagggaagggtaacactagcgttttttctcacagttataaacattcccacataaaacagggttggtggactatgggtgagggaacaaatacttaaggctccatctcctaccgctgactttcactcgttcccacgataactggagagaattccttgggaactcctcttcacagacttgtgtgttatgtgttcattctgtgccaggacctggtcctggcctggatgccttgatcaaagctcataacttaatggagggaaacagaatgctggccgttcggccagacaagtagtgtcctttaggattggagctaagctggaggcacctgtgtttgaggtgccatgccctccttagtctcctacgtattcctgccagtggctgacttttctttctggggggtagacagctggtgtttgaagtggtaaggtatcccgtgggatctacacctcagccataggctccatgggatatggtagtggagacccatgcttgctgtcttgcctttgctgcctgccctctccttccgcctgcttgtgtttggcgagctttgtcagttgcatgcctgtgatgaagatggcagggcagaagacttgactatttctgttggtaacataccagtgtgtaaattgggaagttccctaagtgcgttcgatttctatattcatttgctaaaatttatgtgacccataatgtcattggtatgcccatttgcagtgatgtactatcattaaaagtgactttggtgaagtggctttggtgtccttgtctggaaccgtaaccttcagctatagaacacgccgaggggaaacacatgttttagatcttacaatgagcttgggaaatagtacccacatgtaggctggagacttcctgtggcgggcgacaggcagcctgtgaggagagcctgctttgggaccaggactgttcctgtcatcgagtcccgttcctaagagcggcgcccagaagggtgaatgagctgccctgaaatctttaagattccttatgagatttcaaaattgcgttcatgaacatcactcacttggaagaaaatggcttggtgtcctcctaagactgtgcacacactacattaatcctgtgctttgttcatgactcccgagggagaaggaagatcagtatttaaggctccccctcaaaaccgtctgcctctgctgggtcacggctcctactgttgtaggagttctttcctttgtgtttgtttgtattttaagattataattacacagcttttctcttccccctctcccccttcaaactctcctgtgtacccccttgttctctttcaaattcatatctttttttctttaattgctgttttctgtgtgtgtctctgtgtgtgtgtgtgcctgtgtgtgtaataccagatacataaatacaacctgctcagactgtataatgttacttttagggctgatcatttggtatttggataaccgattcctgtgcttttccttggggaagcctgtttcgtgcgcactcagcattccttggctgcctgcagtttgggtttttcctttataattgagtccttgtgagctttcccccttctatatgagacggtgtctcctaaatatgtcacaagctacagccgtgaagtctcatcaacatggctgcctaagcgtgatccgaacaaggatgacaccaatagacattgttggtttttgttttgacaggaatttgctgtgtatgtagcgtaggctggcctcggatttgagatcttccagcttgtgcctcctgagtgctgggactgcaggctctggcaccaagcccacatgttatctctgcccccaactgtagtctgtaagatagataatacagtgattgtgccgaaaggtttgcctttgttagtgtagaagtaaaaattctagtgtggaactcccagcacttggaagacagaagcaagaggattttgaggccaacctgctctacatgatgagtttagggctaacctggactatgagatcgtttctaaagtttggtatgatgatgcaaatttgtaggcttaccactcatgaagccaaagcaaggaagataatcaagactgcaaggatctcctgggatacatatggagaccttgtnnnnnnnnnnnnnnnnnnnngaggtaggtaggtaaggggaaaaaggaaaaaggaaaaggaaagggagagaagaaaagaaaaagaaactagatttttgaaatagcaatgttatagtagatgagtgacattgtactttggataaaaatttacaaagcgcttctgacaatcgcctgctgtgtgcccaaggccactcaggttctcagctcaaatggtagaagcaccattttgaaaatccattggttttccagggtatctggttatatttagatagtcattttttctgctgagtatgtcctgacaatcccttatggcccatggttctttaagttatcacttgctaggctgtactgaggactctgagccagatttagtggtaccctgtaaaccccattgtttggggggattgaggcaggagaatcacaagtttaagacctgcctgggctacactaagcgagtttgagacccagtttgaaaataaatagataaggaagtaaagggatggtaactgacatcagtttagtggttatcttagggtttctgttgctatgctaaaaccctatgaccaatagcaacttggtgatgaaagaatttattccagggaccagggatttattagggcaagaactcaaggccggaacctggaggcaggagctgatgtgtaggcagtagaggggtgctgcttactggcttgcttttcatggccttctcaacctgctttcttatagcacccaggaccaccagcccaagggaggaaccacccacagtgagctaggtcctctcttagcaatcaccaaacaaaaaagatgtaccacaggcttgcccacaggctaatctggtggggacattttcttaactgaggtcccttctttcaaaactggctaattgcaataaaactagccagcatggtggtggagtgcttgcctgatatgcaggaagctctgggcttaatcctagtaccacagaaaacaagaaaaaaaaatggaggctctgggtacgtataagccattcttgggtcaagttgcctgtgggtgggggcagctttgagttcctgtggatgaatcagccactgacgcctgacactggacccagccgcagagggtaggaaacagcgttgcgcaccattacagcttctgttctttctttcagaaatttccagactcttcattctttctcatttttagattttgcgtggtttaaaagtctttctagatgaacggagaaacgcacacagttgactatgtcctgaaatggggggaaaagagaaacttggagttccaggttaggagtctcaggagctgtgaccctggtttggggtttatggggtcttggctgtgattgagagtgacccacctgcatgtgttctgctggtgtctggtggtccagggtgggtagcagagcctcagttttatcagcagcagagatggaagatttcaacacttagtatattaaggtgtctgccaagaattagagcagttggcttcctgtgtctcctctgaaggagtagtgctggtcagaagccctgcaagatgagaacgtttgcccctgggacccttctctgctgttaagtcaagggttgtcttctagaccctctgggtcacacctctcctaacatgaggatcagccgaattacaggctcaatttcaggcagagctgagcttgcatctgatgacagcaaagacctccatgtgtctttcattatcctgttgccctgggagatgctgtttaagttggcaaatgtccttactgaaagcaaagcttgtcactggtgagattactaatcccccttcccctagcccccccccccccacactcccaccccaaagggatcaaatgccaagggaaaggagggaactgtatagctttgaaaagtgtggcgaagccatcaagttcaccaggaatagtaggggtaagatgtggtttcagtttgtttactaggttcaagatgacaatatctcaataacaaacttcagaggggtgtgtatacatgtgtgtgtgtgtgtgggggggtgtggtgttgtgtggtgtgtgtgtgcgtgtgtgtatgtgtgtgctttcctgctggcattcaggtgtgtgtgtgtatgtgtgtgtgtggtgtgctgtggtgtgtgtgtgcgtgtgtgtatgtgtgtgtgctttcctgcttgcattcaggtgtgtgtgtgtgatgtgtgtgcctgtgtgtatgtgtgtgctttcctgcttgtattcagatgtgtgtgtatgtgtgtgtgctgcctgcttgcatacagatttttgcatgtgtgtggcatgtgctgcctgaatttcaaactcctagaaatcatttagaagctctagcttgttttggtcttcagttccagacttattgatagtaaatttcaagaaacttaacaaaaaaatcagactgagctttgtgatttctaggtcagaggtacccagtctttctttgcagagaagaaccattttattttactttattttttattttatttttactttttaaccttcctctgtggccttggggccaggccggttggagaaaagactaactccttcgttcacagagcagcttcagtagatacaacctcactgccatccagtggcggttggctccacaacacaggagctgacgactagacccactctttctcccaagccttttttttttttgtttgcctctgctgctcagttttctatttttttcctcctcccaatatggtacctgcactatttcctgcctccccagtggtaggaatcgaacccagaacctgcccgtgcttgatgatccccgccacctagaacttctcagcccctgcaagcagtatttgataagaaaatttgactcgggcttaaggaactgagagcaattgaatctatttaccttgccccatattcctaacagtagttcttgctatctggctccctaccctactcccccaactaggcataaagtctgtattttctccttgactgtttctgttgctttggccgaaggattaatgctcagcgggtgcatctgctcgccacacttactttaaagctagctccccatctccctttgaatttgtactttgagctgtggttgaccaatatcctagcatggttcatgacactttgcctgcatttcagttaagggttatgtgtcccataggatctgagctggcctcagagaaggagccaactagcaaatggaattattttgccttgtgaaaaattccagccttttaaaactgggctctgagaaattaaaaaaaaaaaaaaaaaaagcaaatattcttgggaagaaatggggtttgtgagtacttggctaaaaagtttaggaaaggaaagaccatttcctctggcctcaggaacacattcaatgtgaaatatgactgtttttaaaagagcccagtttaaatttattttggggttatttatttgccttgaaaaataaatggatccagtgcttataaaaaaatgttcagaatcctatttaaaataaagtgagattttgctaagttaggcaaggtgctcccagcatgtgctattaattaaaagcagctggggcttttagacgtgtttgcaagtccgcaccatgagcagagctgttggaatctggtgcacacgtttggctcactttactggagttcttcatggtagctggaacacatgcatcttgcctacctcagtggattcatagtctctcaacacttgaccaaacaggtgggacgtttcctccacaggaagagtgactgaaacagaaacatctaagccactcttgaaaagtggcgttctgtgacccccatggattgcagcattaggcctcacgcttttataaacttcattttgattttatattatgtgtggtgtatctgtgcatatgtgttttgtgtgtatgtatgtattcatgcgggtctggatgtgttgaggccagaagtcagtgccaagtgtcttttcttagtcactttctacacagacacacagacacacacactaatatttataacatgtaatataatatttatacatacctacatgtaaaatagataataatatataatatattaatatataacattaatatagatagtgtttaagtgcttgccaaacatgtatttgcacataccatatgcattcctggtgcccatggtggacagaagagggtgtctagtccccaagaactggagttacaggttgttagttgccaggtgtgctgggaattgtacctgcattctctgaaagagcagccagtgctatcagccactggccactctccagtcccactaccctatgtgcttttgacagagactctctctagctggcgctcactgatgtacctaagctagctggcgaattaactccaaggattcatctgcctctgccttacaggtaccaggattacagacaggttcttccaggcttttaaatgtgggcattggggatgccatcttggatcctggtgcttgtgtagcaaatatttcactgatgatgcaatcttctcagtcatctttctggaatctcaagagatgccaaaatgtcggccatctggtcaacagtatggtcagtaaataggaatgtgtacatttgaaagagagataaactagtattactcagtgtcagagtaaacttctgggaactcctgtgaggtccctagtcacctggtgcaaatgagctcagccaagagaagtccccaagaaagcagcaattctccccctatgtaaactcagtaggtgtttcatcgctatgtgtggtcgcttcctcttctgctgtcccctcctataggttagaaaagaaacttggaagtttactgaacagaatttcaagtcgtggatctcagattggaaaaggactgtatgggttatctttccccacctacacttcctttccttctaaaataaaaataaaataaaatcccaagaggaggaggaggaggtgtaatgttgagatgttcggttctttcccaagaggttggggcatcaccaaggtgttttcagcccaaaggctatttaacgtttaatgaaaatttcaattaagaagtgaccctgtcaagatcctaaggctaggcctatagaaatagcagttcttggattgtccagaccgagaagtgtcttagtttccagttgtaacttaagttttactgaaattcaagaaatgacacctttggaaacatttaagtattttttttaagacctataattgtgtgtggttttgctttttaagtcttaaatcttatggaatatagaggtgcagcttaactcagttgcctctagctttttttcttcttcttccacgaggcaaacaaaaacagtatcttaaattaaatcagagtttcctgaggttctggaatcttattcctaaattttccactgggtaacctccaaggccccctcttgcctgtgtccccagttgacacgagtcaggccctgactccaggaatgggttcgatgtggctctgaggcagcgtttctggggagagaacctttgaagagaataaatctagaagggcctggaacacttttagccattgggttgttagagagcacaattgttttggagcttctgagatttctaagtagatgatgaaatttaacactgtccgattttctaaaattaccagggaagcatcaatccctggttttcgtgggttctttcagtccgcatgaataggttagcaaacatctttcagcgccacacacgtggaaaactcatttgtaaagaaaaaggggcagttaatgtgctcaggaataaatacagaagtcagggccttcccaaagactggtatccattggtatccgttcttgactgccagtattggaataatttgatgatcagggtcggcctccagcgcagctccactgtctgcttcagcaacagagcagagaataccacttgttagctactgctttgtgactcttgtggaccaagagttaatggaactctgccctgcaaaataattctggagggaaatgaggccgtgacaaccgatggggctgaggaactcgtgaacacacgaaagtatggtggaagacgtgatgtgttcatgtcagccttgctgtctgtacagcattgagcctcccaggtttgctcaggccccactgtgcttcatctaaagggaggaagtcaggatgtcagggaacagccaggatctaccactccctgcaacacccaatcctgtggctgttcacggatattggaggggagagactcaaagaagtctttaaaaacaaatatctgttgattcaaaatagcacagttcaaagtaactaatggtcctagtctttttaaagatttatttatttattatatgtgagtacactgtagctgtcttcagacaccccagaagagggagtcagatctcattacggatggttgtgagccaccatgtggttgctgggaattgaactcaggactttcggaagagcagtcagtgctcttaacctctgagccatctctccagccccaaccctagtctttaagggaaacagtttgtacttgcttattagaattggttttttatttttagagtctataaactatatgtaaaaatactttgtaatgttttatatgctacaccaatttatggcttgcttattaatatttgatttgggtcaagtgagtatggttgtttatcttgatctctatgaatccattgttaggtggagcatgttgataatcttaattagactttcccaagattcctatcagtgagcagttattttcaggaaagaccgtccttcacatctttgcaatgagaagaatttggcttgatgctccatgaaaattgaccatgtcctggtgtcctgggccatttgcataccatgtttcctgcatcagtataatggatttttcttttagtgagttgaagagggtggcttttgtgtgggcaaagacagagtacctgaagcctgggactggggaggatgtgcagtgtgtgtatgtgtgtgtgtgtgtgtgtgtgtgtgtgtgtgtgtatgtgtgtgtatgtgtgtgtgtgtatgtgtgtgtgtgtgtgtgtgtgtgtgtgtgtgtgtgtgtgtgtgtgtgtttgtgtgtgtgtatgtcggggggaagcatcggcaagttaagaaagggttaggaaaggaagggcagctgctcggcaagcatacgcctcgtgctcttctgtcccctagtatcttcttactgaatcgcagtgcattcactgggacttttgtaccttcgtgacttcagatttcaggggaggtggtatgttgggacctatcttgcattatagagcatcatcaggtatggccactgtagggagaggtcagaagtacatcatagaggcttcttgcacatcgctatgctaggtgccgtagaaagctggcatgatgggtggtctggaccgaggtgggagcaagtccagattactgcgacatctgggcttttcctaacctctctctagcatcttgagttaaaggagcaagtaacagatttgggaacttagagaaataacagacaggcagacctaagaaagttcccttaaactttacccttcccttaaactttaccctttctgtctaatggaaagatagctgacatgacggagtaaccatgaacttgacccctttccctggcttaatgcagtcatggcagccagttggcacatttcctgttctgggtgtaaaacactctgaatgtgttatctgtttgctgatgcttttatatgtatgttgcctgcaaagttatagtcttcctttgtcagataatttttccagagtacattaacatttccaaccaatcatttattgtatagcttaaaaaaaaccaaactagaactgtcatttctgagggagactccgtatctaatatctggtccctgctctgtgttaactgcttgttcacgcatgcattgtgtgcagcatctgttacccaggaagtgacatttccgagggagattcccctgtggaaaacataactttcccattctcttgctgcttttccagaataattttttttccttttttaatttggtgggttttggtaatttgtaatacgtggtctaagatggaaactgtctgcaactctagtctctgttacccgctccccaccaccaacaccttgcaatgaaaaagaacaaaagctactcacgtgtttaaagaaaactctcttctgggcccaaacgattaaaggctatttgcattatgaaactcgttgtgctttttataagtgttaggtgctgggttgaaggtccacaggccacttctaagttgggttttaggagtcacttcatgcaggaagacagctttgcagcttaaggaatggctgcatggctcagccattctctgtcatcattcttatccgaagtgtgcagctcagacttaagactgtaaccaccacccttgaaaaatagttccatgtcttcataagaatgaggtcattaacccgaatgctctataaagactgaattggtgacaactgtactactaaaatgtataccattggaccatcttatcaagaagaaactcagttctataaggagcctgcttctgtctctaatattggtagatatttctacctcgaccccttttatattataacttctgtccatttgtctttcagccaatatgggacatgttaataacccctaatttaataaatgaaattattcctgctcatattgtccagatgtgaacctaagcagaccgtgtgggctttctgacttaatggctaagcgatgccagtctttccctggtaattgaaccttctgtcatctgcagttagcagatgatggtctcgaagcaggaggcacacagtcaaacttcctgttcgtttaaagggaagccagggacagatggagaagcgtcagatgcaagaaccttactaatcacaccgtttcagtagagccctgctcatgtcctgctctcacgctggacactatgacaaactccgagatagctggaaacccaacaggtttttggcttgtgtcaaatgctgtgggtgttcccagctccactcagctcagcccaaatgcctttccaggagggcagagccatcttgaataaccccagtaaaagtgtgcctgcttactcgatcctcttggaacactatggtatagttcatttgtttgtcttaatagtttttattttgaaatgaatacatcccccagatgaccaaagccacacagaagaagatcggaagactgtttgaaagagcactgctgtctacccagttctgagtctaccagtcttgtgtcacagcctgctggcaggtccttgctctgtgctgacattgttccaagtgtgactagggcgggcaagaatgaccgtaaaagttttggttaattcattttctgttttacatttataagagtaagtgcaggatgcatgtcaggaaacttgattccacgcctccttctgttcagagcccctgttgcagggccctgtgacttgtttctgtcccagtctgaagtccacatggtggctgtgtcatgtattctgcgtgatttcatctaagatctggcattttccccttccaaagtgaatggtcagttgggaaaggagagaactgtgcccaagctgctctcacaagcactcttgtggtttttaagagtgaggagggatgtgtgtcgagtcgctatgatggggcttgcttccattggacagccagcaatcagatatgctatgcatttaatggtggactctcttaggaaagaagactatgttctgtaaaggccagaccaggcaaggagcagttctcacttcctgagtccgttctctggccacagaaccactaataatgttgccatctggctctggacagtccattgatgaagtacttacttagtacatggggagtcccttgaattgaatgctggttctggctggtttggttgtgtgagactgaacaaattctttatctgggtctccggtctgcccacctcctcataaagatgggatgatggcagagccctcctcacggtgttgtggacaattgtatttggaaatttcagtacacccactcaagtccagaatgtagcacatattaaatcatcatcatgttggccacgacgatgacgacgatgacgacgacagtctttgtacccacagttcagatgctctggccttagtgcattgtctctgatcttgtgtggaacgggattattttcccataaccacattttaaaaaacatagttttctgaagaatgaaatgactgaatggtaacacacacacacacatacacacacacacacacacacacacacaccccagtaataacctgtggtgggagcagagtgggctcctcagactaagccacctgtccctgtcctgtcattgactgactgtagtagttcacaggcagatttgttcccccacccttttctcagagtcctatagtgctgtgcatgcattgctcagaattccaaaaccatcaaaggaggttactttgacagatgactcagaagtagggaagagtgaggactggaaagagaagccctcctagagccttaacctctttgcgggggggggggggggggggcaaggggaacttgacagggcaaactttacaaggtaagacaatgaaaacaacaacaattctaggatgtcctactccttggtagaaggtctctcactcggcacgcttcctnnnnnnnnnnnnnnnnnnnnnnnnnnnnnnnnnnnnnnnnnnnnnnnnnnnnnnnnnnnnnnnnnnnnnnnnnnnnnnnnnnnnnnnnnnnnnnnnnnnnnnnnnnnnnnnnnnnnnnnnnnnccacatggcccgttgtcttctgcgaggtccatgttcagaggtcaccggaagctcttcagtcttttttattctagcagagtgaaaatgaatacttaatttgcaaagcctgctttaagccccacaccttaggttcagaaggataggtcattgtaaccagacgatgtgtcagtgactcctaccaccctctcactttctaatgttttgcacacacatttgaaggaacctgtgcttgctgatgccagccatccctaacacgtgattgacagggtttcggtagcatggcagcagagaacactttttggatattttctttagttacatttcaaatgttttcccctttccaggtctcccctttggaaacccccctatcccattcccccttctcctgtctctatgagggtgcgccccccccaactctcgacctcccgccctggcttcccttacactggggcattgaacaccctcaggcccaagggctgctcctcccactgatgtccaacaaggccatcctctgccacatatgcagccagagctatgggtccctccatgtgtattctttggtagttggtccagtcaccaggagctccggggtgactggcctgttgacactgttgctccctatacggggcggcaaaccccctcagctccttcagtcccttctccaactcctccatcagggaggggaccccccacgctcagtccaatcaaccattggctgctaaatccacctgaaaggtgtaaatttaatactttcctatttagctatgtttccaactcccccctagagtttaagaactagaagcagtttaatatggctggtcttattaatcctattaatctttgacaatttctctcagctgcaccgcgaggatcccgagatactggatatttagttcaaagttccctgactctcactgcccatagagaaaccaggaacagctcaagcatgttcctcctcttttggatccccctcccccccttttcttttctagatatagtgacagttgtgcctagaagaggatctagtcatacaaaacataaaactcacagagaggccacggctggcttttaacccctctctggttttcctaagtggcttcaatgagcatgtctttacaaggctgttgcaaaagcgaccagcaggcggagccctaacgcagtcttacaatgatttcttttcacttctccccttgaacgaagttgcccaagcgctattggagccaattgaaaacatctgttgttttatttatagctacaatttctaagaagcatattctatagcggttgaaaaaggagttgacagctcataattcataaagttactggggctaatctgatagaacaaaatgtacaaaactccttcccatggtgcaggcgctatcacttcctgttcaaccctacaaagaagtagtggctaagcggggcggaaggggaacacagaaagggtcctctgtgagatgctaatggcagaagagagcaccccacagcgagggcagtgccttcccctctgccaggctgagtcactggttctttttcattaacaacatcccaggtatttccatttatagaaaatcagcattttcccaccaatcccactttgcagccaggaagtttcagctgcgtcctgtctgcaggagtaggagctaaggtgttgattaaaaagcctgactggttgccacccagatgggcggcaggcttattttacaacttttcattcagcaggttgctcctttatattgagttgcctacttcacgctcccccccccgccccccagacctttaagcaattattacgacacaagcactcctcaaatgtcatctccctgtttgttagcttattctgagaatctttggcggaacaaggtcagatgcaatcaatatatacttaatattttgcgacagttctatctacagtgcttcctggtattgcagttaagggaaaaaaaaagttagcctgacataaatgagttgccatagcttagtactagttccaactggcggtgcttgtaagagactgtactgagacagtccatcttgcttcagtgggcccatttaacgttcttaaagccaaggtcacttctttagtgaagaggtgggtaagtttgtgttcatttatttgatgaatgtggtgtcttttgatagaggaaaatgtgttcgcccaccagaattaattgcccgcgcggaacagtagtagtaaagacatattgcttgacttctttcaaaccatgacccttcacaccattaaggctgtgtttacctttatctcaagatcatttgcctttattctgtggaataaagctttctgcctgtgtcttttttttttttaattaaggggttttgttaatgaataactctgactgttacaacctcagtttctcatgtatttctcgaattttattgtgaattttccattcagtatttttgagtcattcatctttcttgcccatcccatatgcaatccatctttctcttcttcttcttcttcctctgatattctagtctccatatattttgttgtggttatttatttttacacgtatgggtgttttgtgtgggtgccgtgtgcatgtcctgccttcagaagccacaagtcgtcactggatctcctgggactggagttagccattgtgaactgctgtgcgggcactgacaatcgatcctgagtcctttggaagggcagctaatgctcatacccaccagtgcccaggtctttactggacctttcttccacctgatgactcacagtgagcccttcatagtttgccaaatatgataagttggccagttatttttagctgaataaacccagtgacattcctgaggaagaatgtgcttagtttagccttatgagaaaaatatttaataaatgctgtcccaaaaatatttagcctggcaggggctcaggcctgataaaggagaagtgatggtaagatgctgacccaccaatcccagcccgacttgaacaaacatgcttcttgtcaccaaggcccgtacgtgttgccaggatcgtttatatccatcttattcaaagctttttgcagcctctgttcttggctgggtaacctccagcgcgcaccaagtgggcctcccaagaaagcaaactggatccattcagattagtttgccacttaactgctgtactaactttgggcaaatcacgtcgttattttaaatcttccttttcctcatctgtaaaatggggataattatacggcctcccaagctcttaggggtttgagagtgaaagacaaggggcttctcacctctagtcatggtaactgggctccactgcatctccaatgccccatttccacagtctctccaaaccacacatccaaaccaaggagtcttgcccttagccagaacttcgggacctcagtcaagttgtgactctcgagatgcaccaaacaacaagggtctctgcccccaatatctgttgatatgacattaggtaggatatccaacttaatcactgagacagggagaccttctacttagttccatctgctgcgtaacacaaggtgttttgcggagtttcactgtaaaaccagcctttgaaaccaagcacagctagggaacagctatcagtattctggctcctggcgtccttttctctttatagctggaggaacactcatcctcaattcttgctccttgaaagttgtggtctgagatctcgaagcatgggtatcaatcacttgctcagctggaattattgataagtacctgaaaccttatacagcaaccctctttcttcatcactgtcagaaacattcttacccatagaggtgttttctaaatacttaaaagagtttgctactgactttctagacaaaggaagttttttgttttgttttgttttgctttgttttcactttaggtgtggatcttgatacatgagctcaggttaccataaaaccttagtaaactctggtaatttggtaaagacctggtaaggaagccttatgcctccttccacagatcctcctctggaaagtgtgagaccactgctctcattatgaaggaccccccccccccatacacacacacacacacacacacacacacacacacacaaacctcatttaaactcaataatcttccagaggctgtctcttgagtatcctcactttaggggcagagggtggtacctcaaaggacttcaacatatgatttatgggaaacacaatatagtccaaggcaactgaatcacatcccttaccttgaaatgtaccataaaaataattacagataacatttatgacaaaatattaattgttgggtctaggtggagtatagccaggcattcaagttttcagtatatttttaaatgtcagagaaaagtaatggctgactaggatggggtctggtgattctctgttgcctctgatgtccatccagcctttcttaaaactctcagcattgttcatctgaaccagtttactgctttggcagctcctcctcctcaaattctgtcctccgttggccagcatttgcttctgcctgatcagtgggtttgccagctgagatcagacatcttcctggcctctggggtcaccatgttaactttccagtcccttccatctcctctaattgcatctggggcttctcaaactcctcctatgatctggcttcattggagcatttgtaacacgtttttatacatttgatggtgaggtttagtatcaaatgtatataggagagatgtgagcattgcgtccagccctcgctcaccttgttctgcaaggtgttcctacttccatctgctatgaacaggggtgcccactgctccactgtgtgtacccctgattacctgtatatcaaaacagtgtgagaatggaagagaatacatctgctgtctaacttgggggcaggagatacataagcggatgctgctgttgaggtggcttttcttgaacccaccagtacttggccattgcctgatgggaatgaggatcacatgtcttctgtattacatgacattcttactgcagttaccactgaaatttgggaaccttgaaattttgggaaacatcatagcaaacatgtccaaaccagggactgatgaagagaaaactggcccatgctaagcacatacacactacttaggagcttatgacatggaccaagtggcttaatttctcaacttctgtttccttgtctttacatcaaaaaaacaataaagactatacatctttgagctggtatgaaaaaagaaaaaagagcatacatgttaaaaggtgtggggacatttagctggtgccattaacactccttccttcatgcattcaacaaagagccaagtgccaccacgagaacatatgtgaaatgtgatttttttttctcttactccccacttccacctccccattctttcttttaggggttatctaagtcatgcttcaaatgaaatctttctaagccaacagaccaaaggaccaacttccttataaatcactggcctttgaaattccttggactcaactataaattattttcttgctaggaaatgggggtggggggctcactctcttccctatttacctcctgctcagcattttaattcgctgtgcacagtaagttgtcatctttacatcacattccaatttaggtgataaagatcacaattaattagcttgcctgtcaaagattaagtgtaaccttgcccttctgtatcctgaagtcactttatggctttagtagaggccgtcaggcaaagctgtgcacctgcatatacttcctaagacctctgcctgctgtttgtttctgaggctgacctagaagccagtctagaaataagattaagtggacatagactcctattctcttctgacttgtggagcaaaaaaaagatgaggcaggggatgaacttggagatgttgagaagtaaggagtgtaggatacctgcaaggactctcaggcgtcagttcaaatctgttagccgcctgaaaatgtcagtgttactagtaaccctagttacctcagaaaacagtggttacacctgaaaatttactttcacatcaactcccatatttcactgcccatccttgcgtcttcattctccaaagcaaaacctagttcacttgtggaagcttaatagaatttatcacacaatcattccaacttagtttatccttcagattcagagacttgaagtcaaataacttacagactagtgttatggtccttattaggagacaatatgataagttcaaaatagtataatatttgagttaacttctgaaaagatactgagtattatttatagagtgagaagcaaaacgttaataactactctgtcagatacgcttcaagctcctctccttaagaagtactaggaaaactgacctaatattatatagagagtctacttttaaattttgtcatcgtgaatgaatatcgaaaaaaatcttttaatggagcagggaagattgcccagtagttaagagtactggctactctttcagaggacccacactcagttcccagcacccacgtggcagctacaactatcaataactacagttctaggggattcagtgccctcttctggcctccttgggcacctggggaacatgtggttcatgtagagacatgcagacagacattactagatgtaaaaatgaaaccttttaaatctattaatcattctgggattaatgattgtctttctacaccctgggtactttgtccactaactcatataattactcccattttacagaaaacaaaaaaaaaaaaacaaaaaaaaaaacctcaggtctaaagtcaattaacttgtccaagattactgttcttaagtggtaccccaaggatggaaacacacgtctctttgtgcttttaatcatgtcagcactactgatgaaaccagtgtgtaccaaaatgaacaaacccatggtttatttttctactttgtttttgattcttagtcttactgtcttgcccaaagagcgcaccagcttttgatgtggcttgcagcccacagagcttaagaagtttgaagtccagggtattagctgttataggtagacagtatgaacgtgcttacagcgtttgtttaagaaaagaattggggttgctttgatttgtgtccactattttttttcccctcttttgaagtcactagagaagattggtacagacagaaagaaagcttggattcagcaagtcagtagacacgttaacatcttgacttaatatcgatcccccatttgcatatatcctttctttcctgtgtagtccatgttagattttgagtggaaacgaggaacttttcacacacttccaagccgcttccattaggaatgaaatacttggcttgggcagtctctgcgttttgatgtttccgcttaaactttccactcgctcctgccaggcactaactttaaaatgtctttttcttttcttttaattttttttttttaatggagaacgcctccaggagctgcagctgtgtgttggtttcatcttgcacttggtagcgctggcaccacttagagcacagaatgctcctatctcccacacacctctggtgcccaggagtgttgaggcttgcccacttcagtagtctgggaagggcttcaggttggagagaggttctcttctgttctgtgattggctgtccccagggtccgcagaaagagcaaacagaacatgctgcctccaacgtcgcatgagtaatttcttctatgacctggggctcctggttcaccggagttcttgtaagtgtggaaggctagcctacctgccttccttagcaattagacatactagtttagactcactcttctcagacctttcgactcttcttcctttgttttctttttcctttttccttgcacaacattaactttttctgatgaaaaatgatttggctaagtgagagactgggcttgggtgtgtcaggaaatctacagatacttccagatgcggaagaaggattgtagctctgcagcccttagacaacgcagtagggcaagcttccaaccccaagtgcattctgattcagaagcagactgtctggagaattgcatcgaatggaatgtatatgtaaaatggaaatgttcagcctgctaatttgggttttgcttggcagccccaacctgtatattctgtagggttttttgtttgtttgtttgtttgtttgtttgtttttattgaaatttttggtaccattttgttttatcagagtttgatttgatgcttcatcatggacagggaacagttagcctgttagtcatccctagctacttacttcctgctggaatcacttacgatgaaatctacggacagaaatataggtcttacatgtgtatttaatggggttagagaatagttaggcttagaattgttgtaagaaagtaacacttgttttagagtgctgtttagaattccagggatggtccccattgtctaaagcaggcaatcggaacggccgtagcatccaagcctgaatatttctgagaggaagcgtgccgagtgagagaccttctaccaaggagtaggacatcctagaattgttgttgttttcattgtcttaccttgtaaagtttgccctgtcaagttccccttgcgcaatctccatcagctgttgtgagtcatacctttgcccaatctagcttcttcggtattaaaaaattcagctgggtatctcctcgatacggcacaaaaaaggagaactcttcctccccctctatgtgcacagtgctttgaaaaggccagtgttctcactacagtggctttcagagacctcatctagcagtagtctagttgtgagatggagacactctgtagctcaggatattgatttttgttttttgttttttttttcagctgaagtagaggaagatagaaacctcctgtgtgtgcaagcacttgcccagccagcaactgttgggtgcatatttcaataatagttacatgaaatttttaattatcatttaatttagtttttatatttgcccatggaaatgatcgagttgataagattttggaaagagataaactttattaagcaattccgatctctgtgccagtgggttttttttttttttttccgatgaaaaatgcttgtgttacatgtgaaggggagaggacttgaggattagttatgtgagtgcggtaggggtgtgtgtctctactacttacccttgggtttgggatttgggctgtgctgaggcttgttagcaggaagaccctgtactgaatcctgatgggtagctcttctctttgtcttcagtttcttctgtacatatgtatgtggacaggatgaccttcattttgttccatgtagaagggaaggtatttgtgggagaggatactgctgtgagctgaaactctgaagtcaagggaagtggtttaaagtttatcaaaggaaatgaaatggtttgccctttgcagctgttgctgctggtgtgtgtgtgtgcgtgcgtgtatgtgtctatgtgtgtgtggtatgtgtgtatgtgtcttttgcatgtttgccttcttctagccaaggtcttttgttaggagatagcccaggctgtctcttaccttgtaaccttccagctgtagcctcccaagtgctggattacagtcctgcactgccattatcagtgctgatccttagtacttacaatgggtttagttaggaattttcttaacatcatatacaacttataatatttgcagcgctgaaacctaattatgaccatttagtgtttctaggagtatatgaactgtctgttctagctaattataaacacctgaacttatgcattaatgacagacaagttactcctgaagatgtcgtcattaagattcacaacctgtattttggagtttgagaaatttaaggtgaaatgtttagctccctcttctggcatagttttgaaaactacttttacttcagccacccccaccccctttctgaataagaacatggtcatcactgtaatgttgtcagagggaggcatttgagattgtcatcctatttgatcgtttgtattgttgccattggtaaaatattcacataacatatgaagacacagcatatcacaatacttggttaagagcatttgttgctcttacagaggatccaggtttagttccctgcacccacatctgtaactccagttccagggaatctaatgcattgtctttcctcaaaagtaccaggcacacaagtggtgcatatacatcatatacataaatgccagcagaacactcatacacataatatgaaataaatcttaaaaccatttgaagtctctcttttcctacccatatatatatatatatatatatatatatatgtatacacacacacaaatatatatatatgtatatatataaatatatacacacacatacacacatatgtgtgtgcgcgcacgtgtgtgtgtgtgtgtgtgtgtgtgtgtgtgtgtatgtgtgtgtatgcatgcatatgcaagcaaagatttttgacaacatttacacaggggctaaatttgctgttgggtggccagtggtcatttgtgttggcttgcagtgataccttggcattgatagaactcagtgcaagggcacaaaagaacaccaagctactaggaagtcagatatatcagttatggaccatgtaccatggtaacagcctatctcaagattttatctagtctcgcctacctgagcaacagttctttcataataatgtagaagccagacttgctttcagagtctctggacttcccctggttgtgttcaggacatggggctgaagcatcatctctttattctccctgaacatgcaagctctaggctagcctggagctcctccacctaggcccagcctgtactccgaggtgccctaacatagggcagtctgtccttggaaagatgccccagaggggagaacatcagaagcccgttgctaggggattctgggattcttggtgagcattcagagagttctctctggaaggaaacaacacatatgtctctggggccccagcactgtgcagcctggcataggaatccctttaggagactccagtttcctatggttgggaataattaaattacttgtatttaactattcttcattgtgtttgaatgcgcttgactgccttgcatgaaacctaatgttggaaatctttctctttcagcgttgccccttcctgacctggccgagcagtttgcccctcctgatgttgccccgcctctccttataaagctcctggaagccattgagaagaaaggtaaccagacttcttacaagttttatttcatgactgttataatttataagtatctctgggccactcgttatatgactgtcttactaactgctgtggatagaggctatgttatccacgcactagttgtatggggaatctgtactgggaagaaatcctggctaataatttctaactctaggtcagtgagtagttctcaactttcttaatgctgagaccctttaataccgttgtagtgatatccaaccataaaattattttcattgcctcttcatgactgtagttttgcttgtgctatgaatcatattgtaaatatctatgtcttcctatggtcttaggcaacacccaccaaagtggtcgtgttctacaggtagagaaccactgttcaaaaactaatatgtgcttactatgtgagagctattcaattctttataatttaataaagatgattattaagatcctgctctttaatagtccactggatttgccaaaattattgacataccagataaaattaattgttgaggttggcttccgagaatatttagtacacatctagaatagatagcggatggaaattggaatgtccctctggcagcaggctcacaggttctcctgagagctgtgttttgcatacatggtctgttttgtgtcctaggactggaatgttcgactctatacagaacacaaagctccagcaaccctgcagaattacgacagcttcttgattgtggtgagtgtcacgggactattataaatgaggataaagtttctgtttctgatgatgtacctcacccccattcatacagcactgtaaatctcaaagggatttccaactcacatgcaggagttccttctgccccattacattagcatccacaccttagccatagggcttctgagttgggactggaatataagctctcaaccctttccacatacacaagcccctgggttgagcaggaattgcagaaacagccttttttggcatttacctgactctgtgtctctgtcattgtccctgagccttgcttgtcagccacatctcattcatttgggtcagccaaaaagattctaaaagtctgtgtcatttaacgaatgtctcctggtgtcctcttaccctttcctgtctctctttccctcccacctggcttgctggctgtcttgctcacctgctcactttttcccaccctgtacacattgaggagcatggcatcgggtgctttcttcagtaatgtaccgataaccctgcactctgcagagagaaagtaccaggttagtgttgagttatccctactgtgctggctttcaggatgactaacatgccattgaacgtggaattaggagaaattgagaacatttggcctcctgaaccagcaccaggcaagccagctccgacacaccattacttaggagacaccaattcattctgccaaatggtggcttcgtatggcttcctcttttccttttccatataggataaagtagtacaacttaccctggctgccttccttctcatgccagcttctctctctcaagcccttcgtcccttcacagtattctgtccctttctgtttctttcttggagctttctaccatgcatcctttacccacgtttgtagatttaaatgaaagagttgcatttgctgctgttcttattctgggcaaggttctgtcaaaaccctgctcgaatggggctgcccacgtgaccctcacaaggtaaccctttgaagagagaagccacttcgggattaggcaactcagggaatttctacaaaaggtgtttcttagaggaaagatcgagactagatgcttatcagtgcttgctttcacttgaagcaaacccaaccaagtgtctgaactcgggtccctcgtgtgccttgaactcagctgagcatgcacagggagggctgcattgcttttttgtgtgccccgtgctcttaccaactgggccactggaagctgacgggcaggagccttactggagtggtaaggaaacgctgaattttgctctctgccaattaaaatagaattacatgttttggttacaaaaaaggggggggggtgttgtgaaattgaacacatgctaaaagtcacaggaaacgtaaagacaccagaaactaatgaaactatgaaaagttgtggttaaggttttaatgttaccaatacaaaaaacgatccgggttagctttggaaaaagtttttgctttttttcacaccactcatgagatggcgtaaaccaccaagattcgctcacgtcagtcatgcattttgacaactttccttccccattgacatcaaaagccacatgcagaaaactggtacacgttcctagcgaagaaagagcaaaccttatccaaacttgggagcttgcacatctgccagagtgtctccgggtggtggccttttcagtccatgaagctattagagtatccatggaagcctcagtttcacctgacagatgctggctttcaaatacccatataaatttgcagtgccagccagccagaggtgggcagccacctgcttttcctcgcccttttacagcatctcatgttaacttgatgctgctgctgctagtgactcttaagtctccagcaacaaaagccccgattaagcaaattcttttaacaggatttagtggtaaattagcaaagttgtgatttatatccagattagattagtctggttgtcccagccttcctctcaccttcctcattttaccctaaaacatttttttgttgttgttgttgttgttattttacttgagttttaatggtctgaattttctcctgacaccttttggtttctcttaacttgagtacggcttcttcaacctggcgctctgactgtgttctgccgatcaagagtggaagaatatcatgctcactgcagggtatttagccacatccctagcctctacccaccgggtgccagtagcatccacccccagtcatgacagtcaagaacagtctccaaatagtgccagactcttcctactctacccccacgccctgggaaccactaaaccagatagagatcaacctgtggctggctgggggttgggggggtgggacttccccggggaactagagtagtgaagcattaaaggaactggttacccatcagtagtttggtgaggagtgaagtgagggaccaatacctcttagctgtgggtagcgaagagctgcccggtggtattaattcagaaagggaaccatgtattgcacatgtcagaaaacccagggcatgggagaagtcacaaaaaaataataaataaaaccaagtgtactctattgtcaactcccgtggatttatacacatggggaatttatcccaagacttgtgaagcataatttcattcaaacactgtgaagactccaaggaccgggcttcctagattcttcataaggtctcggaagtgagcacctcccaagggctccagacctcatctatttaccacagctcttgcgttggctgctgagcaaggccggaagagcaggggagaggcacactctgtccttgaggccccctaagtgtgatgtgagattcataaaacatacaaactgcttgccaggtgtcctagtgaaggcattgctcatcagcccctgcaggaaggagcactaaggggatgatgcctgagagaggaacatgggactgcaacacctttaagtctacacacgtctcctaatgggtgccacatatatttttcaggatgagcaagtttcgagataccccttttcaaggcagagagacgagacatgaggcatacaagggccacgtctagaggagccagaaacctcagatgctcatataatcttaattggcattacatcatttcacaaataattgctcagtttcaggctagatcctttatgcaaaggcccagcagggcctgtgcacctttgttagcatgtgctctgtggtcttgttagctctctagggtattgaagttatcttcttaggtcttacctcttacagtttttccttgacctggcctatgtacatttatactaggctgtggtgtcacagtctcagacatctggctacttagtgggacaaggtttgcttaatgggatgatgtgcccaaagactttctgtaccgcagtctcaccccagattcccatagcttctcagtttggaggtcacttcccataaagggatgggtaacctcatgtagtggtcataaagaagttgacaacactaaaggtttctgagctaagatttaagtcagacatgtaacactctaagatgttttttggccagattgacacacgcatcgcacttcactttcgctagccttagttctgaacatacaacattcatgcttctcactgtgtatgggggtccatgttgtcaggccacttgcacctaagctcagattcaacactattgtatgttatggattatctacacagagattcctgccccatagaaacagtgtgaccgaactatagaagactttgacgtgaatctttcatcctcaacatgtctatcttaggatgtttgtatacagacacacacatacacatatatgcacatacacaaatattaatatgtctttggattgaattatataaagatgtttgatcgtaaaaattgttctttgggtttcttttttttaaaaaaaaaaaaagttaaataaattttgggctggaatcattaggaaagaatttccagaagtatttggaatggcccttgacgtataattccgtcatttagtatcatggatttatacaaagcgacgtcccagcattgacaatttttaagtcaacattgattacctccaaaagcactgaagatgctctgtatctcgaagcatcaaatactcagctaagatttactaccgcataagaataaacaaagaaatctctaattaatatgcaaattagctttcacctttaatcaatgataaaagttatatgtgttcctagcaattctggtaaaataaactgctttataatttcattaagtatttgctttgtatgcctgttttatgtacctaactatttgggatcatatacaaatttcctgggtacaaagagatcatgaatgggcaaaggtttttttgtttgtttgtttgtttgcttgcttgtttttaattgaatggggcaagtttaaggagcctgctttgcactatcatctttagttcgaggataacctaaatactgtcctcgccttacgtagaagcatcttaaagtgactctggcatttctcatctcccagacactgcctgaatcagctacacactaggttatatctttatattatcttgctccgtatatctccttggcagcagaacccccagtgccttagtgaaggcaggagaatgagtaatgtcaggtcctccttctgagcacactgttccccagataaggtcccatcaccaaatgcctctcttctatggatatcctggatccttcttgctctcggtacacctgcttcctattggccctcatttcctgtcccatcccaaggactgaactatgcacacctcccgtgtacaggaaagtactttaggttacccttggctgaatggcgtggcctccttactagccgatgggaaagctgctccttttctctttcttcccagctagtttgatgctcacagattagaaaggagcagcattaggggaggcattctgagcctgttcagattgctcagtaggtaatctggaaatggtttgctcttctgagactattcaaattgttctgtaggtaatctggaacttgtttgctaaaagcctgtagtatctagatgttcggttgatcactctgttagggttatatttcacgcagccttcatcagttaagatttgggaaaaccagggctggagagatggctcagtggtcaagagcaccaactgctcttccagaggtcctgagttcaaatcccagcaaccacctggtgactaacaaccatctgtaatgggatctgatgccctcttctggtgtgtctgaagacagctacagtgtactcatataaataaaataaataaatcttaaaaaaaaaaaaaaagatttgggaaaacctggggcttctcttcttcctgtagtggttcgaggagacgctgattgtatggtgagctatttccaggacagagcctcctcagccacagcagaaccactccagaaaactgaataaaatgtatttctcgcacagcctcacaggctggaaatccaagatgatgaaggtttaggccttgttcgcttcctttgagattccctttctaggctccccaacagccgcctctcagtgtgtctttctgaggcctttcctctgttcccgtagtccctgtgtctgtgtctgtgtctgtgtctgtgtctgtgtctgtgtctgtgtctgtgtctgtgtctttgtcttttttttataatgatgccagttagcggtcttagggtccactctaataaccttgtttaatcaaatcaccccttacaggatctctctctaaaccgtgttctttctggaaaactgggcctttgacttttaatacaggcatggagaggatgccaccttagcagtgcagagtattaactgatcagtaacagtggcatatttttgttgttgttgttgttgttgccccaagacatatgggattaacgtgatagttaaaggcggattgtgagacagaactccatgaggaaaagctgttctgtcccaacttcaggaatgaaacagtggtcagtgtgccatgcttctgttctgcatcgctcccttccctgtgtctcgtttaagtcccacacttggaaaactggcccaacagaaagtctgagtgcctcttacatggtttcttacattgtttctcttccagatgccgcgtcagtggacttggagatgatcgacgtacacgtcttagcagatgctttcaaacgctatctcgccgacttaccaaatcctgtcattcctgtagctgtttacaatgagatgatgtctttagcccaaggttggttctctcttttcagacctctcggaatggatactgggatgtaggtatacttggcactctaggaggcgccaacggccctgtataagtaggaggtgttgagaaaacactaaactgccaccccagatctcctttaccacacagcatctgatagaagacaccctattgtgtttgctcagaagcctgcccaagtgagaaactggctaactgttaactttttgatcactctctgcaaagaccactgcagctaggcaggccacagccatctagcaccggattcggagatccagtactagagtgcacgatggggcatatttttgccctcttccctgaacacccagaacaaaatgtgtcgagggtggaagactcagcatcgggagccgaggctctgctcagtgctttggggacaggaaattgtggtccgtgaccttcaaagtataacctgtgctacttatctgatgatccgaggaagtagccaatcacgcttggtgctgcctgatggaggccaggcttctgagagcacacccagaacagtctgtgggtttttttttttttttttttttttttttttttacaaaaagagttgtcttgtatttcatttgacctgagaactttactttctcacaatgcatttcttactaagaaggacaaatgtcctaggtacctttcctgaagatgtctgtgtgcacctcctcgtgtagctaagggagagagaagaaatggtcaaagcgttggctcaccggcacctacacctagccttactctgtttcctgttttgttttgttttgaacctgcagaactacagagccctgaagactgcatccagctgttgaagaagctcattagattgcctaatatacctcatcagtgttggcttacgcttcagtatttgctcaagcattttttcaagctctctcaagcctccagcaaaaaccttttgaatgcaagagtcctctctgagattttcagccccgtgcttttcagatttccagccgccaggtaagtgaaggatgaaaagaaggttcggacggtatgggtgagagctgatgagtggccctaaattgatgcctcacagatgcacgttttctggggacttacttcacacacatcaataggatgtagatgaatgaaaagagaattacttttagaaatgatggttctcacaaaatgctctttgttgcagctctgataatactgaacacctcataaaagcgatagagattttaatctcaacggaatggaatgagagacagccagcaccaggtaaggctctgcaacatttgacattcacttccggctcagcttttttggaccttgaaatcggtggtttctagctccttggaattaacacagatctctgcaatccatagtaatatgctaatttatggttcatggaaaaataacagtggtggtatttgtgaaatgtcatatgtcgggttttgcaggttttaagctaccttggttttacttttttattttttatttttatttaatttactagcttgatacaaggtctcaccatgtagtccaggctggccttgagctcactttgtagcagaggttagccttgacctcaagattccttcatgtctccatctttttgtctcagatgagaatagagagagctccctgggccttccaccacttaggcttcgggctgctgaataaatttatggagtttgttgcagctgttgacattttgttgttgttgttgttgtttttccaaatcttacaaagtagggggatttataattactatataatttaaagtattttggagtgtgtgctttggaagtgactataccaagaaatgtctgtcaaaataaacattttcagtaacgcaggcggtatgaaagcagtgttctgctggggctgtttagaccaagccagatgccattctaaaagcaggtgggccttcagctagccatttaagtccaggaagttcaggaagcaggaagagcctggaccaaagagttcaaacaacctgtgatccagtagcagttagcttactgggctggccttttagattgattgtcagcccttagcaggagagcatagttgcagggccaagagataagttctgcttgtactcctcctcggtgccaggcttttcaatggagtaccctgcttcttctatctgtgatgggtaactcacgaagattagcaccgctgtgtgagcagccagggggtcagagcatcctaccgtgcgtttctgtctgtcattgcaaggtcagctgtggctctttgcatctggatgagacagcttgagagaggtcaggtcttgggctcaaaacatggatgagcacccaggatgcaggacctggaaagaggttctgtggactggctcaaaatatggtacctagagatgatggatgaatggtatattccaaaagttccaaaccacagcagacagcatttaaccagggtgcccagagctatagacagtgcatcaaggaacctcagcctagcttgggatttgaggccaagggcatcaccccatatgatcctgagtttactagagaatggattcaggagtgttgggttatccttgggagctgcttttgaccttaacggggaagaaagagtgtggaggcatggatgtggctgtgagctatagagattgcctaccctgagactcaccacacaggctaggaaggaagaggggcaccaagaatattcaggccctgagccaaaggcctgagctgcaaatgttcacttcctcctgcttgcctttggctgtttgtcggagaggaggcacagctgagctttgtgtgccctgaagggcttgggatggtgccgagtcgggtgtggggaatctgacgagctggtcatcatggtcttcttaatggcactctctggcctcattggggaatatacatggaagcccaaagccagacaggactttcacaaatgaattgattactaagggcttatttgtctggggaggggggagttcaccactgtagtttaatacaaatggattaaatgtcttttgtaaggttgacttataagagtaagcacgtatcatcagtatccattttcatactgcggctgatacacagaagagggctacagtgccctgcatagacgcttgtatactaatttcaaaggaggattagttccgtcagctcggccgaggaatgacggatttgaacggactggattgtcccagtccttgtgcggcttcttcaaaagagagagagaagagaaaaagaattaaatccaagtaattcttaagccctatgcgagccattttcacttcatgcggtatttctcagccacgatgagcactgtataggccccgtgggaccaaatggatgcttcagtgtctctcacctgtgcaaacatttcactctccacctacaagagggtaaaagaaggtgcctccgtcctgagtcacctttgggctctaggatagctccagtgctgtgattggtagggcacccccaggcaagggtttgggtgtgtgtgaccccagtgggaatgcagtgcattcccagaggccctcgtcgctagcccagcacgaaagagtccctgagggctttggaagctcacctccagcacatctcaaatgaatgctcataaaccagtcgtttaatagaaactgctgctctgaacagaaaggagtcgttgaaggatccttaagtggggactacaaggaagtatttgttgcagggcagattgtctctgggctgttaccaggtagtacttggaatgataatgctgatgtctgaggcacaacttaaataaggcctgttaagacacagtgtctaaatactagctgggagtgtacttctcccaagagaaagagctttagaggtgctgttggtgacattttagggtgatcagatgagtggagaagttcatgaaagagcacaccccgaaaggggccttgaaaagcagatccagttttaactggaggaaaggaaaatagccttttgatttgcaggcagatagcgaatcaggttgtggcaggctgtgctctctagggtgtgtacactctctaggacatatgtacgtcgccatttcttaatgtgtttctccaagctgatccaccaggcattgacacaaggccactttttaagtgacggtgttaataaggcatcactgggacgatgaggagacaaagctgagaggttcgctttatgctgcccgaccagtgtatgccacacctggacctgcccagaagctacctttgagttcagcctgtcccatctgcaggtcattactggattaatctgcctacattactggatccattacgaatcatgggcctgttttcagtgtctaatgaaaaggccttctgaagttctcagaaagtattgagctaacaaggagagagggaagatcttagggccatatgcagcaaaggatcccagtcctatgtgggtagtttgggggacaaatctccacgaggtgtttgtagtggaaggagagttgaacctctctccctcggtggttaggatttaacaagctgtgtgtcttggtgggtggagtggcctaggtgtcaacgccactccctctgtcaccttgccagtgtgcccttgcacagtgtacagaaagtacaaccgtacacagtgttcccagtgccatccactctatctgtgtcccaaccagtcccggtgtgctttctctgcaggttgttaacatggcccattccctgtgtgtgttcttcagcccctgttcccttatcttaaactgccctgtggttgttggttgtttgcttttttactgtaaatttaattggttcagctacatttctaagaagcaaagacaaaggctattcctcattttgattcattccaattagtgtctggaattagcagcctcctaattctccatatatacacatacactgataagctgttcagattgcagtgaaatctcagaagccaactgatttcctgcacccagcagccctctgaggtaaagattccttgatttatggaaggagacacagatggggacaggtgatggggacagtatgctttcagagctctattgtcagcttgccctccatcccctctggttgagaagtcttcattatatctgaagctgaacagcaggttttctggaattccttaggctcctcagacggggcgggggcagggaggggcacggggaggggggagctaagctgatcccacagggcaaccacagtagagatcactgtgaacacagggtacctctgaatactacccgtgtttcggatttcatggatatattcagaaatattaatgtagcataattggaggctaatattgcacccgcaagccaggcggaggaaagaagtgacccccccaccccccaccttcccacccccgctgccctcctacacatgtcaaggttgatttttaactgttggtgctttgcaaaacatcgcagaatccatgcatcttgcttgaaacaccccgggctgcattctcagctgtagatgtaagcaaacacgaagacgagggaaataactttcagagtttcacttttctctcatttgtttttcctcccattgggtttaaaatatggcctgacatgagagagttgtctctaaggtaagatctgagacgttgaaaaagatgcaggccccaagaggggtagaggaacaggggagagctgattccatctcatgaaaactagaaaagttttactcgagttccccgagtgccacgtgatcgctgccctgggcacgtgctaggccatgtttttacttttgttttcagggtacagctttctctgactctgaagggacagacatcacaggatggggggtggggtgggagggggagttccctctgtctgctagacagtgggcgtgggtgtgcctttgcagaaagcctgtagcctgtgtctggattattattattatatatttttggtatgtaaacctgggtttgtttattaactggaaagggaaagggtgttttttcttaatgtgggttcattgagctcgcatggatatggagtcatgaattagccccgtgctggagggccctactttctaagatgtcttacattggaattgtgaagaaacatattctttttaccctgggtaactttggataattcatttttccctcctgctgcctgttttccctggcttttgttcattgacagtggtgcacatgagtctctgagaagcaagctttccaggtctcgggtgatgccccaagaggtcttgttcagagcagaaagcatgtcacagaacttggaaacacatgttaataatcatgagagtttcttggctagctgaaatctactggcaagtcgaaccctggcctgcctttgcctctgaagtgagttgtacaaaaccctgagaaaaggggttctcactggcctgaagcatccagaaggtgaagtgagccttccgttatgcatgtgcaatgggtcttagcagccccaaatagataggatgccaagaaagcacaagtttctttttaaaggggcttattagccaagtggaaataaattcctaggtaattgtgacacctgtgactttggtttagtagtgaattacgtatatttataagctatttataattatgtgttattaatttgtggggctatttggatacggaggaggtgaaactggaagttgatggttgtctcttaagcaggcatgatttactccgttctgccagcagagggcgccctccttaaactaataaagagcagaaagcttctgctcacacttggagttaatgtccttaatagagcctccgtggtaggggattgtacatatagtgaggagtttgtttgaaacaacctgtccatggctattcgggaccttttctggtatatactgtttaacggtagatacttttgttctgagacaaaatagactgtcagatttacagtttaatcgtcgcacagacaggtatttgtaagaagccaatgtctgatgtttcttccagagaaactcttttgagatcagggcaatgcatgaaaataagaaggacctttgtttttcttaagctaaaagaagaaaacaagaaagccagagttttgttataggtgtgagggtttgtttttgctttttggtttttagtttttcttcagagtggcctaaaagaaagtaaattcagcttgttagtttcgactttccatgaccaaggaaagccaagactaggggcagtgggctgagaatggaatttaggaccaaaagtttttgggggctttgtgattttttttccgttaatggttcaaaagaagtgggggcttctgggcagatgccatggggacgtttcctaggaaaagacttgatttctgtccacccagcaaccctaaacccagttagctgcaactttctcaaattacagactagaatcccagagaagggaaagcgcgtccttctctgtccctttgtcacacccagccagcacttaacccagtgcagacacaccagttaacccagtgcagacacacctcttagatactccagattagaaagtcctagggctatttgaaggtgagctgaagttgactccttaaagatctgggcttgcttgaaggatgccctccccggggctgctagcctgcgtgtgatgcgctatgtgaagggctttcctgttaacacctgcggggctgactgtgccagtgcgtgggaggaggaggacacgagagagaggcaccctgtcctgagctgttccgagaggttcaggccttcacaaacgcggctttgattctattttttgatgaactaggtggattacttcctgtgctgcttcactgcggcccacttgagtccccggagcgggggctgccagcgcgttacaggcaccatggccaccagggaggactattttcagcacccccttacaatgcccttctcatttcccggacgaaaatgagcaagttagtcttgcctcggccacttgtcagcctgatgacaactttgactttgacttgggtgcccctccccctcccaaaatccctagctcagcaaatatttgaacctgcccgagttaatcatgaagcctcgatctttatctgagcgagacgtgcgagcgcccgccggggctcctttcttccccggtgcagtagctcgacccagggggctcttctcgcggagccggggacttgctgccggggcggggcgtggggcggagggacccgctgcagcctagccccggggagccggcagccgggctgagagtcgcgcgcccccgccttgcgcgctctcctccagctaggttctttactgccggtaccgggcgggcgggagaacctcaggggctgggaccacttggtagaagaacagcttctttgaattttttttttttttttctctgtgggatactggcagttcaaagcgaaaccgttgaaatgcataacctgcaaagtaagtcttttttttttttctttcatttatgcacttctctgcaccgggctctttatctgcaaggcgtcctctctagtttggctgggcgggcgggggtgtgtgtgtgtgtgtgtgtgtgtgagcgctggaagtgtgtgcgcctgggtgagtgctgcctggggagagcagatgggcgattagggagacactcccttctgtcctccagggggggacactgcggagaagagatggggtttagtttggagtttagaaagtactgggcaggaagttggggccaagccagggcttgcagggaccgtggaaaatcacctgtctcccagacctgctctttgggttcccttgccacatgggcagcagcagtctacagctaggctgattttactgagtgccgtacataagtcccctgtgggctaacccttgggccttactgcccagacaacctgtctctttacttttgggagaagactcaacgttttaaattaaactacttttttaaaaatttatcttatctaaggacacacttctctaccatttttatttgacgttgagtttagacttatttaaactttgggtttctaatctaccggcaaatagagaagtatgaggtggaaggggacaggttgagtctccaataatacagaaatgcggtagagaagggacgccagtggacagcatccagagaacggaatgccctgctccacttttaatgctgtgcgattccaattgggatagaaatgtaaagtgctcccccacccccgtgttgtgtaaatccttccctaggtgcacaacattcacagccacaaagcccactctttaaaaggaagccacatttacattgcagcattaccccaaccatccatgtaaatgtcaagaggttctggctcccaggggcaacgtatatcaagctccagtcttggtgacagaattgcatgcagaatgatttaaagagccaaaatgaatcattacatttgtagggaaattgatttctttatattgaacactactaagaaggaatatttgtccgaccgcccccccccatccctcagtagggctctgagctaaagagagaagtggggggggggcacagagagagagagagagattacatcaccttccttaaagcagctagcaatgagatgggttcctgagtgagacacttggcagagagcacctgtactctgcgttctgatatactgcctttttttttttttcagaagcatcctcttgcccagtgtcttaggcagtaacattgaaactcaccactattgagcatatgcttagcatttctacaaataatagacagcttcattcctgtgctgaattttcatgattattctataaagtcttgttttgaccttgggatatctgatagaggcattttgcctaagtactgtctttaagcctctctctctctctctctctctctctctctctctctctctctctctaatgtggtgcgtctatggcagtgtttaaaatccaagctctcagtgaattgtggaagactggatttaaatatccagagtgctcggatcttttctgcttctaatatatgcgtgatatctaagggctgtaatagagaccttagggatattttggtgcctttgtaagattttttttttttttttataccaaggaatagccaggctatctctaaacccagatgcacgaaggggacggagctggaagctgcagtttatcagctctcgtcaatctgcccacggtggaatgtaccatgctgcagagtaataaagagagacttagagagcacagggctgggagagagcaggcaaattaaacaccttaaatggtgagcacggagatgccggagcggagcagagcagagccggcgtgacatgtaggctctcagagagaggctggggccgtgtgaagctggcatccaggagaactgacgaagcaggagtggtctggtgacatttttctgacttgattggctggggtgtgtgatgtaataggttacagtgcgggccgtataggttttaaaatgaattccaagacaccattacaaagaaagccggactcttttcttataaccgagcaaagccaaggaaactgtcgcacacatgtacaccacggtttggactatggaagacctggacttagagtgtgccaagacagatataaactgtggcacagacttggtgttttatatagaaatggatccaccaggtaaaactgcagtattaacggagagagctagataattctgtgactttaattttttttttttttctttttgaaagctgctgtaacagatcctcttgaggttgctatttttactgatgtgtttcacggtttaaaattagtttgattagaactttaaaattaaatagactctttgcctgcctgtagcagcaagcagcccaggctgtgtctgataaatgctggttcttgctgaatgcatgggaactggtttctactttttctgtccgctgctgtcttttgttaattgtgatccttggcaagttgggctatattgttgtattttgttcctttcattaagaggacgtgtcctttgtgaggcttttctctgctggctctgggctctgtggtactttgatgacaccgggtgcttcagaaagcatgtgagatgtagcagtgactcaaactggtttctgatgatccgagactctctcataaatcagatgtggggactttctcgctctctctctctctctctcatgctgagatactacaatgggaaaagaagttgtctttcctcgcctttgtaaaatagtcttactagacacctggaatcttcccggggcataaattcaagcagttacagtgctttcaaagttaatggttttggatttagctaaaaatcttaggctcattggttgttccctctggggtcagcccttcctaccacgagggaactcagagacgccgaggggcttcttgccaccctgtgggtgctgatttgacactgaagaaggggatagggtttttaaccggatctggcatctaaagcccagcgtcccccagcagaagagtaacatggagactaaggagatttaggtcacagatgaggttcttaaagtggctttggcagagctgtgcctgaagtatcaacatagaaaaacccagttcttaaagcatgcttgctgcaaatgagggctgctttaaatgtgactgctgtgttcaggcagggcacagcaaccaaatttgcctttcgtaattaagggagaggaatgaaagcccagctcctgttatttctgcttctcagatgttcctggtttcttactttagacggagctgctagggtgcacaactttagtgcagataaaatctagaagtagagaatgtcgactctggatttgctatgaaattttctcccacagccagccccatgtatttcctaatctctaggttggtctgtctgtctgtgtcatctctgcacccctacccctgtcatgcactactactttttcctttccagttttagttttaagtcatattctgagatttccttcaaagactagtgtcttccatggcacatgaaattatgaattcctggtatccgttcccacccctcccctttccccctccattgtaaatgtttttagtaaattcaattgccttttaactgaaaattgaattgaatttttatatattttaactaaaataggattataccactcaccccctaccccttactttttgtttgtttgtttgtttttataatgaaaagatgcaagtctaattttaaatgtacacttgggagttcggattacaactttttttggtctcctcttttgcctgcagcactgccccccaaaccacccaagcccactactgtagccaacaacagcatgaacaacaatatgtccttgcaggatgctgaatggtactggggagacatctcaaggtaaggccacagagcctctccttctcaccggctgcagggaggtttcgagtaagagcagagagcactggcttgctcagtgccgtttttaggatgtcatccaacataagcatgaagcatacttgggtctcttccaaagatgacaagaaaagtcaccgagcactggagcactgtgggtgctgggtgacataggacattgaatacccaggaagcttccctgttgccagaggtgccagagaaggtcggggtaacagggcactgtctgctttctctctaatgggcagggcttcgggaataaaggggtttgctcctttagctcttagagtggttagtgagggagctgctagaacccccccctttttttttgtggatcctggttttctgtgctgatttgaaagtaactggtgtgtatgtgtgtgtgtgtgtgtgtgtatatatatccaacaatttttgtattatagtcaccaatagtgtaaatgtgtgtgtgtgtgtgtgtgtatgtgtgtgtatgtatatatatatatatatatatatatannnnnnnnnnnnnnnnnnnnatatatatatatatatatgtgtgtgtgtgtgtgtgtgtgtgtatgtatatatatatatatatatatatatatatatatatatatatatatacatacacacacataagtgtatgtaatgtatagtgcacttattttctgtgggatgaatttgtagcacttttgtataagcaaagaaggaactattagtgttctttgaaaatgtacaataccaacatgtaaaatctaaaggaccgcagaatgtaaagacaaggaacctttggattttctgctcagtgtcctaaagaatagtgtctcttaagactaaggatctatcccagtggtaaatcaatccccagtgcagaagaagggaagctctgtgtgtgtgtgtgtgtgtgtgtgtgtgtgtgtgtgtgtgtgtgtgtctttgtaagtgtgtggttactcaaagttgaaaagtaagtatggtcttatactgtgttcattttagggaagaagtgaatgaaaaactccgagacactgctgatgggacctttttggtacgagacgcatctactaaaatgcacggcgattacactcttacactaaggtgagccaggaagtcagctgtaattgcgatgtctcagttgtcatgaaaacatttcttcattagattgcctatttttcctccttaaattagcatataaagtaatgggtttcactataggattttttttcaaacatcttcgattcgtccctttctcctactgccttctcctccccatcctgagagccctccttctgcatcagaaaatgttaataatcattatttttgtattgtatttacaggaaaggaggaaataacaaattaatcaaaatctttcaccgtgatggaaaatatggcttctctgatccattaaccttcaactctgtggttgagttaataaaccactaccggaatgagtctttagctcagtacaaccccaagctggatgtgaagttgctctacccagtgtccaaataccagcaggtaattcacacagagctcctcccgctgcagtaacaagggggccagagactcttcagcataggaaatgatctgaaattgggttttgacaaactttacaccctgaccagaattttataatagctaaatcagataccatattgactatgccattagggattgttatttgagtaaatagcttatcaactgaattctttttttccctgcttgtatattcttccaggatcaagttgtcaaagaagataatattgaagctgtagggaaaaaattacatgaatataatactcaatttcaagaaaaaagtcgggaatatgatagattatatgaggagtacacccgtacttcccaggtgagtttaagatattttggactaacacatactatactcagattcaaaggaagaatcaagtgtctctaacccttttcagcttaacccatgcttataaagtcctacattaagcttgcttctaactcgcagtgttactattatgagcttccagttgatggaacgttaatttccgactggttacttctgcctaggctagacattgataataactgctaatgtcagtttgtccaagctctagaatggaaagttcagacccatccctcctgctgtgaggagaaatggccgtgttgattatcagagaaagcagcatgggtgtcataaaataaaatggctttttcaaagactgaccggcttgtacttacatacttaggaacacacacacacacatgcatgcatgcactcgttcattcacacaacatgaatttgaaggaacaaggagtggtatgtgagatggttgaaagggaaggaggaaataatgtaattatgttataatctcaaaaaaaaaaagaaaacataattttaaaaagtgaaagacagataattctctgtcaggaacatctgtttcttgatcatttgacgagagttggtgaattcatgaccagccctgctaacatacacagcccttgcctatctcctgctcctgaatcctgaagatgcacagtgtaggcatctccccgcccccttgctcctgttgtctaagccataccgtacagctatttacgtagcactgatgttgtctcatgctcaagccatttagaggtgatttggagtcgatgagaaaattgctcaggctctgtgtggccattacatcacttcaataagagacttaagcatctggcttgttagtggccaagagggctgctggtacccatggatgactgtgctgactggcagctcatttgcgttgcatcgctagctagcttgtctcttatagtaaagaagtcgttctctgaaagcgatgacattgcctgatgaaacttgtgttgcaggaaatccaaatgaaaagaacggctatcgaagcatttaatgaaaccataaaaatatttgaagaacaatgccaaacccaggagcggtacagcaaagaatacatagagaagtttaaacgcgaaggcaacgagaaagaaattcaaaggtagatgaacctcaagaggctcccgttatccttgtgacagaaagtggcaaaaatcgtttaagattggtcgcagtgaagatctcccttcctgtaatttgagcaactttcgaatgaaattaacaaaaccccctttactctggggaccttgtatggtgtacgtaggtgcttactggtctgtttttcctgcctgcaggattatgcataaccatgataagctgaagtcgcgtatcagtgagatcattgacagtaggaggaggttggaagaagacttgaagaagcaggcagctgagtaccgagagatcgacaaacgcatgaacagtattaagccggacctcatccagttgagaaagacaagagaccaatacttgatgtaagtgtcggaggtagaacccgaagacttggcagtggctaaattcaaggagggagtctcaatgtccttcgtttgtaaaactctttcaggtggctgacgcagaaaggtgtgcggcagaagaagctgaacgagtggctggggaatgaaaataccgaagagtaagtacctactgaggaggcttttttggggggtggcggggactgggcagtgggagttttgtcaacagatttttcagtgactttggtacaaatcccaagccaaaaaaaaaatgtataaaggtagtggcagggtccagagcttcacccagggagagttgagcccaggagggttgggttttttgggtttttgtttgtattttaacccacagttgtgtaaattgaccctgtgtgtccgtaatgatgtccccgaacatcaggaaaaaaatccccacatatttttggaacaatgagagaaaaccaacaattacgtttagtgtattttgagggttaagtatatgtttagtttgaattattttcaaactggcagtcttcttaataccgtccctgccctcggcccaggttactgaactccaggtggagatagtaataactttctgccagccattcaccctgggggttggtgagaaggccaaacaaaaagagaactcggagagaaaggctgagtcaccttatccgacttgctgggaaggagacccgggggcaggctgggttcccacactcttgagtcacaagccttcccttctgcccatgcagtcaatactnnnnnnnnnnnnnnnnnnnnnnnnnnnnnnnnnnnnnnnnnnnnnnnnnnnnnnnnnnnnnnnnnnnnnnnnnnnnnnnnnnnnnnnnnnnnnnnnnnnnnnnnnnnnnnnnnnnnnnnnnnnnnnnnnnnnnnnnnnnnnnnnnnnnnnnnnnnnnnnnnnnnnnnnnnnnnnnnnnnnnnnnnnnnnnnnnnnnnnnaaaaaaaaaaaaaaaaaaaaaacgttctaaccttgaagaagtatggttagtccaggcagatgaatctgttaagaacatctaacagagagacagacacctgctgccatttagtaggacagctgggacaagtgaaatggctgtccctgcccctctacaagtcagtatagctagaatgcatagtctgttttgtgagagcaccacctgaaatagataaagcaagcactccttcagggacgaccaaaacaagagcgaagactccatttcggtcatcagacatacaccccaaagtgggcacatgtctatcttgtggtctagtttctttttacatcttaatactttggaggagtactttgaaaagtaaactgggaagccaagcatggtgtctgtaatcctagcactcagaggcgtaggcaagaggatggtgagtggttgaggccagcataggcttcaacatggagaccccgagtcaactgaaaggacaatgcaaggaaggtttggagtcatgagcatattaggggcaagaaaataactgtcctcttgtatgcatggacaccaaaagaaccttctacaacccaccaccgattcatttatgaactatctctttaagaaagacagagggagagcttttgagttaggatgagaggatagcagaatgcagaatacacaccaagatggagagcctaagagacctcttgattagaactgaccacttgattagaacagcaccagagaggttggaaactcatttgtcacatgcttattacatggcacatccagccccacatataacaaacatgtctcataggaaccctactccatacatacatgttatacctctccttgtgttaaaccatttaaagtccagtgaagcaggctcaaatggttagtcctggtgtatgttgcaaagggcactcatagtttactctggctttggggctttggttccccaggagggaaacagacccatccactgtgcccctccacgaggtcggctttgtttaaaaataccctgcagcattccagatcatctgagaaccactgaaaaagacttttttgttcccttcccctttccagggtagacggcgaagtcaagcattgcgtcattaacaagactgccaccggctatggctttgccgagccctacaacctgtacagctccctgaaggagctggtgctacattatcaacacacctccctcgtgcagcacaatgactccctcaatgtcacactagcatacccagtatatgcacaacagaggcgatgaagcgctgccctcggatccagttcctcaccttcaagccacccaaggcctctgagaagcaaagggctcctctccagcccgacctgtgaactgagctgcagaaatgaagccggctgtctgcacatgggactagagctttcttggacaaaaagaagtcggggaagacacgcagcctcggactgttggatgaccagacgtttctaaccttatcctctttctttctttctttctttctttctttctttctttctttctttctttctttctttctttctttctttctaatttaaagccacaacacacaaccaacacacagagagaaagaaatgcaaaaatctctccgtgcagggacaaagaggcctttaaccatggtgcttgttaacgctttctgaagctttaccagctacaagttgggactttggagaccagaaggtagacagggccgaagagcctgcgcctggggccgcttggtccagcctggtgtagcctgggtgtcgctgggtgtggtgaacccagacacatcacactgtggattatttcctttttaaaagagcgaatgatatgtatcagagagccgcgtctgctcacgcaggacactttgagagaacattgatgcagtctgttcggaggaaaaatgaaacaccagaaaacgtttttgtttaaacttatcaagtcagcaaccaacaacccaccaacagaaaaaagagtgtggagaaggagacttacagtgacattcagtatataaaatatgtacataatattgggtgactaactatcaaatagatggatttgtatcaataccaaatagcttctgttttgttttgctgaaggctataaacgtgcagcgctatgcaattcttaatttttattatgttgttacccgtttcaaatacacctttggaataagcttcccttaccccagtttttgttgcttgaaaatattgtccctgatttttgttaatatttgtttttgtcatttttactttttttttttaaagaagtgtacaggatgccagaaaggagaatggcttaagaattaaaactatgaaatattttacagtttttcttgtacagaatacttggctgttagcccaaggttaaaaagttcataacagatttttttttttttggactaaatgttgggcagggccctgataagcttcaaagctgctttattcaataaaaagagaaaaagaaaatgatatatgatatgacaaagtattgctgagtccaacagtgttaagactcttgaaatacggtacctggcaatgtttgtttcctaatgaattgtgaacttcttgaatctggagggagggggaggcagtcatgggttgtaacaggcggggtaaggggagggggggaagtaaggtggtgtgcactttctagggatcccagagaagggaggagccaggctgtttgtctcctgtctttccccatctgagtttggtagtcattagcaattaacagcaactccagacctaatgttgtaactccatcccagcacagttggccagcatctccgttgtcatgaagtgctgagtttgttctggggttcctggaatgtgccctctttcgttgttgtaacacactggtctcaaggttgaatccctgcatttagaaaatgtgttcttttctctttgtagcattggactagtcacagcagtcagccagtcaccattcattttggctaaatcatggtctgaaaaaacagcatctagttggatgcttgatatttttccagctctctgttcagagttcagtttagaatggaaggcaagtagacccaagtgggtggtcactgtgctttgtggagattgttaagtgcaaacatttaacagttcggacaggtcttctcattagcgtgattgtgcatgttgcatacatcacggtgtgcaaagggagcagttggtgacatctttaattcaggacaaaagttcgagtttcccaccctagtgtatatgtgtcaaagctggtgagttcatggggaattgccatgtgctgtgatgggtagaggttgatggtagtccctgtcgcagcccaggtagattcatgagccatcatcagtttctctttctcaatatcagacacacctgcagctttatagctcttcccttatttgggggggggaaggggtcttgtaatgttgctcttgttttgatcttggaatttgcagtccagtgtctgggttaatggtctgtagaatgtgtttttcttcctatgaagccactgctcattttcaagagcaaaagtcagtcaaccagactgtcagcccacaaacttgacccgaccacctcctgactgccaggaaattgattccccgggttgactctgggctttgcaacctccagcggtagcattccgccacaccacatacaactgaagagttaatacttatttgtaagctaggtttgtggttggcttctgctctcttcttcctttctctctttcctttttctttttgtagcacatcatgtatgctatcagatacaaataactttaatttttaaaaaggatctgagattgcttcgtgacaagttctgttaagtggtttttttttgttttgttttgttttgttttgttttgttttgtttttttccttcaacactctctgcaagataacttgcaacttaggcagttgcctgaatttctcatctcactgacgtgagtacaatagagctttcatgtgtcagaaggcaggagtcattgagttatagcacacctgtcctactgaatgcccttttggtgacaggttagcatgctcaccaactctgtccttggagaggtttgaccattaaggttctgtggattccatccaagccatcttctagtaacaccgagtggctcatgaatgcagatagatacagcatagctgggatgtgagcatgcccactcaggttttctcaccaactgtcccattctagagacagccagacactaagctagactatagaagtgggagggttgggaccttgtgttccacaccagagtgatcatagccatgggataaggcagcaagcatattttgcaacatttgacaacttcacagccctggatatatgtatatatgtataatgtgcatggactgtttccaatacacctttcagccacgcagatccacagtcaagttcaagtacataacaagcagatgtccagtacaggtcttgtatatgtgtgtgtgtgtgtgtgtgtatgtgtgtgtgtgttcctgtatttctttgctattgctttgttttgtcttataaagtacaatttgtccacaagtgaagtgagaagtccgtcatttgatactttcctctttttagaagctcttccctttcagggagcagcctggatgatttgcttacctgatggatccctgttctcagtgttgtcaagtcagagtgtgtttctgtgagctgtcattgtggggaaccaatcgctttgtcgtatatctgattatgaactataacttgtttgggaagtcctactgatgttctttattgggagaaagttcttgcaggttttctcaactgtgctttcgcaatgcatggtatccaagtcagttggaaagtgggttttgttgtctgttcgaatttagggtcatttaagaaaggggcagttaagaagcacaatgcctcccatgggacaacattccaaaatgccaaattcttctctttcttacaacaatctataattatataaaataactagtactgggggtagggagagggtagaattggctccattggaaagactctcctgcttcataccgagcttgtcgccatgagatagcattggctgcccaggatgctgctatttaagaagaaaaaaaaatcaaaacaaacaaaaaagccctcatttatatgtgtgtattttttaaagctacactctgttcaatgtttttacaaatctgtttatatgacattgataaactaaagttggtcttttgacgagagggaggatgtcatggtcggttgtaattttgcctttacaaggtaactggggtgggaggggagggagtgtgcctccttgacattttgttcaagatatagattcagtgaagctatgtattgttttaagttgcttaatgcattgtattaggtcctcaaacagaataaaggttgttttgaaacttaaaagtttccatttgaaattttagtgttcaccgggagatgtttctaaactcccaccaacccgtttgttttcactatttcgactgtgtcttataaactgaaggtacgaatcagtcacttgaatgtgctcagtgctatttataagaaatagcatcttaatgcgttggtggtagaaaataaatacctctaggtggtatcatttcaaggcatgttcttgctattcaaaatgtctcatttccctccatctttcctgtcctccacccaaccttgacaatcatctactagttcctttgggtttttgatggcttctggttttgtctcttgtacactggcttatttaaactcatggtaaaatgaggtgacctcagactataaacagggccacttagtccccacataccagtgtgccttgcatcacctagtcaagaaacagctcttcctgtgaaatgacttccccagcgacatttcctgctggttgaatctgccaccaccatactactgtgtatgtatgatgtatgtaggccacacataatatatgtaagcacaatgaggttgctagaaaagaagacactgccaggtggtggtggctcagacctttaatcccagccctctcaaggctgagggggccagatctctgagctcaaagccaacttggtctatagaaggagttccagtatacccagggctacaaaagaaaccctttctcaacaaaacaaaacaaaaacaccaaaaaacaaatgattacccaacccaaagaaacagaaaagaagacatgagctagggttatgagtgagaggacccacacgtctatgccaacagtatctggtgtgtggtaagcaaggcaatagctcttgggtatcacaactcattccctagcttttataccctctggtctccctgagtgagtccccacactgtgattgctatgtagattttctccttcagatgcgagtgaaatcctgtgcacttagctcccagacaaggctctggtcccactgcaatcttctgaatgtctacagtctcatgcagcttctaaccctctgttttctgaatacatcttcttttgggtttctaaccctttcattggctgctgagtaattctgattacttaactttgcctgtaagcagcactatgcagtatctagcagcagggataattttgtcattatgtgaacatcatagggtgcatttccatacacctactggcatagcctgttatactacacctgggctgtgtggcatgtacctatgggctcccagggcccaaatgaattagtgaatatgagagtagatcaagcacaagagcaaatggtagaatccagacttataaactagctatctggggctgctgctggtgtagcattgcaaacttttacagagaacattttataattaggagtgtactccaagatacatcaactacattggccaatgagaactgttgattgtcaggtctcaggtactgcccattgctactttttacacatgcttgcactgtaggtttgtctgaatcagcctttgcacatttatatgataagttgtggcagtgtcataaccgtgtgtgacccacactattcttaggggagctgaaatatcactatgtgacatatggctataatctcgtcaggactggcctctgacataccaagtgactgttatctactaaactcttcctatgctttatccataccaatcccccaacaattatatgagttagaagatatcacctccattctatagatagaaaaacactatctatgcctagaaatgcctataaaaactataaatgcctaggtataatatatattcaaggtcttacaacatgttagaacagagtaagaagagcatctcactgaaagccaaggcacacccttcaacccctcccaagatagaatctaaagacattccatgaaaaaaaaaatgcacagagcagttcaaagaggggtcaccagtagttcctcctgctaagggctgaacaatgtgacgtggctgatagacagaacatggtgcccaatgacgaagggcctgagaaagcttgctcttactcagaagaacacatcagcatcagttgggaccttgctgacattccaactcccagacctcacgcctcatttgacagagtagagctgtacctctgctcccacaaattctgcagcctcccttcatggatacaaagggttgaaaatggctgctttatgtcacctcttcagagtacttctagtgttttagcaaagcatatttccattaatgagtgctcaaaacgttacttcatggcacagactccagataggtaaatttaattagcagtgggagggactatnnnnnnnnnnnnnnnnnnnntcattagttctgagtctgtcagttccgggggtccttccctagtagcatgctagttagcactgtcatcatcacataattggaggggcacgattttccttgcaggggcagccaaacaacgaatggcccaaaccaactgttgtttctaccacaactctttcagggaccacaggggcaatgagtttaatgtttctatagtatatacattgcccaaatcattcatgacagcgaaagaagctacaggcaaaccacactgtggtgcctggctagaaaccaagccaaagttgtataataaatcaataccttagatacattttcaggagaaaactacctctaaggccaccccataaaagtggtagagaaacccaatatttcaaatgtgcaaatctcaatgtgaaacaaaagattatgaaaaaataggttatataattctaataaatgatcacagtggctctctagtgatggatctcaaagaggttaatagggggagtacatatgatagacaatacaaaggaatgactatggaaaagctcaacaagacctgagagtatacatgtaaacagttcaatgaaattaagataattcagagtaaaaataaaccacctagagttttttaaataacctaacagaaaatagacgtttaagaaccactcagtgaatcaactaaaaacaaacaaaaccaaccaaacaaaaaaagacagtcagaatctttaacagtggactatattaaacagaaacaaagtctgaactcaaatcttggcattttgtaatgtgccaaacaaagtaaacaacaaataaacaaacaattaaatgaaattaagaaagaagggaaatgagaggagagaaaagatgagaacattcaaggctttcgaggttccattaaaaaaacaggcagctccatctgaatactcaaagataaccataagaaagttaataatatggaaaacttagaactagttgaaaacttcttcagtcttaggaaaaatataaatatataatatataatgtataggaggtatatagaactacaaatagaaatgatcagaaaagatcttcacttcagcatgtcatagtcaagcagttaaggtaaaaagaaatattttagaatcttaaatgtaccaagacacattttaaggctatccccattatattaatagcaggtttcttagnnnnnnnnnnnnnnnnnnnncactgtcagcaaggtggctgaaggacagtattgcagaaactggagtctagtagtcttgcagacatcttaaaaagctatccttctagggaacccaaactggcaactgagttctctacggtgtgcatggaaatatattttcaaaatgaccttttgccatctcctaacaataggagggataggaaggaggtggcctacaaaatcctattggccagtgtttctcaggcttcctaatgccgtgaccctttaatacagttcttcatgttatagtcacccctaatcataacattgtttttgttgctactatataactgtaactttgctatggttattaattgtaaatatctgtatgcaggaagatctttggtgaccattttgaaagggtcattaaacccacaaaggggttacaacccacaggttgaaagtgactgctcttgggcagcacaggcaaggagaagtatcatcttttacgacatgattactgagcccatttttttcaaacaagaagtggtttccttgacctgtttctgaccatctctagaaatgataatcttgtgaaacatttagaatatatgtaatagattgtttcctatccaaagttcagatcttctcaaaaaaaaaatcccactttgtatcttctagttgggtatcactgtcataaatcagctcaacagaaaaccactgagatgctttcaaaggggcagaggggaggataaatgagaagccaccaacacaggcttgcttatctgcatttggctctccagaaggaaatgaagaaattcctttctctctatagcattcaatcatggcagtctgagcatgacctcaggcttaacttgtgaaagaaagaaagaaagaaagaaagaaagaaagaaagaaagaaagaaagaaagaaggaaggaaggaaggaaggaaggaaggaaggaaggaaggaaggaaggaaggaaagaaagaaagaaagaaagaaagaaagaaagaaagaaagaaagaaagaaagaaagaaagaaagaaaggaaggaannnnnnnnnnnnnnnnnnnnaacattcaaggctttcgaggttccattaaaaaaacaggcagctccatctgaatactcaaagataaccataagaaagttaataatatggaaaacttagaactagttgaaaacttcttcagtcttaggaaaaatataaatatataatatataatgtataggaggtatatagaactacaaatagaaatgatcagaaaagatcttcacttcagcatgtcatagtcaagcagttaaggtaaaaagaaatattttagaatcttaaatgtaccaagacacattttaaggctatccccattatattaatagcaggtttcttagtagaaaacctaaagacccagaggaaatggaattattattccaagtaactgccaactaagaacactatatccagcaagaaaggctgtccttcaggatgaaggtgaagaaaatccttctgagagaagcaaacagaaaagatgcttaagaaagtcccacatccaaagacaaaataaggacctcagtcaccaggaaaagcataaattgccactggcaagcaggtacccaaggagtaagaaagtcaaactatggaacttagaagataatcaagagagagaataaaactcacctgaaacagccaagtgagaataggcaaaatgacacttttactcattggcaatgaacttgaacatgaatgaattgaaagaacccatgctacttctctgagcctggtcacctcacttaatatattttccagtttcattgattttcctgcaaatttcacaatctctctctttctctctctctctctctctctctctcgctacttatgagccttggggaggtggaacgaatggatccttgaggctccctggccaaccagaccaggctaatcagtgacttcaggacatgtaagaaaccttatctcaaaaacaagagagatgactcttgaagcatgtgcacatacattcacacacatgcattcacacacatgcattcacacacatgcattcacacacatgcattcacacacatgcattcacacacatacattcacacatatgcattcacacatgcattcacacacatgcataccttatttatctgtccatattcaaaaagctaatcagatcatgaatacataattatgattctatgtacacacaagtaaacaggatatggatgaagagctctttgtaaattgtattatcattttggaattatgtgtatatacatatttccacttatgggtctgtatgtacaaatgaggagctgcctgtagagtgcagaagagggcataggatctcctggaactagagtccttggcatttgtaagccacctgacatgcatnnnn

SEQ ID NO: 194 - DNA, 3454 bp, Mus musculus
ggcacgagccgagttggaggaagcagcggcagcggcagcggcagcggtagcggtgaggacggctgtgcagccaaggaaccgggacagcgaagcgacggcaggtcgcagctggatcgcaggagcctgggagctgggagcttcagaggccgctgaagcccaggctgggcagaggaaggaagcgagccgacccggaggtgaagctgagagtggagcgtggcagtaaaatcagacgacagatggacagtgtgacaggaacgtcagagaggattgggcctcgctgcgagagtcagcctggagtcaaggtgttgacaagttgctgagaaggacacgtgggaggacggtggcgcgcggagggagagccctgtcttcagtcaccccgttgatggaggacagatggacagcagccggacggccagtcacctctcttaaacctttggatagtggtcctttgtgctctgctggacacctgttggggattttagcccattctctgaactcactttctcttaaaacgtaaactcggacggcagtgtgcgagccagctcctctgtggcagggcactagagctgcagacatgagtgcagagggctaccagtacagagcactgtacgactacaagaaggagcgagaggaagacattgacctacacctgggggacatactgactgtgaataaaggctccttagtggcacttggattcagtgatggccaggaagcccggcctgaagatattggctggttaaatggctacaatgaaaccactggggagaggggagactttccaggaacttacgttgaatacattggaaggaaaagaatttcaccccctactcccaagcctcggccccctcgaccgcttcctgttgctccgggttcttcaaaaactgaagctgacacggagcagcaagcgttgccccttcctgacctggccgagcagtttgcccctcctgatgttgccccgcctctccttataaagctcctggaagccattgagaagaaaggactggaatgttcgactctatacagaacacaaagctccagcaaccctgcagaattacgacagcttcttgattgtgatgccgcgtcagtggacttggagatgatcgacgtacacgtcttagcagatgctttcaaacgctatctcgccgacttaccaaatcctgtcattcctgtagctgtttacaatgagatgatgtctttagcccaagaactacagagccctgaagactgcatccagctgttgaagaagctcattagattgcctaatatacctcatcagtgttggcttacgcttcagtatttgctcaagcattttttcaagctctctcaagcctccagcaaaaaccttttgaatgcaagagtcctctctgagattttcagccccgtgcttttcagatttccagccgccagctctgataatactgaacacctcataaaagcgatagagattttaatctcaacggaatggaatgagagacagccagcaccagcactgccccccaaaccacccaagcccactactgtagccaacaacagcatgaacaacaatatgtccttgcaggatgctgaatggtactggggagacatctcaagggaagaagtgaatgaaaaactccgagacactgctgatgggacctttttggtacgagacgcatctactaaaatgcacggcgattacactcttacacctaggaaaggaggaaataacaaattaatcaaaatctttcaccgtgatggaaaatatggcttctctgatccattaaccttcaactctgtggttgagttaataaaccactaccggaatgagtctttagctcagtacaaccccaagctggatgtgaagttgctctacccagtgtccaaataccagcaggatcaagttgtcaaagaagataatattgaagctgtagggaaaaaattacatgaatataatactcaatttcaagaaaaaagtcgggaatatgatagattatatgaggagtacacccgtacttcccaggaaatccaaatgaaaagaacggctatcgaagcatttaatgaaaccataaaaatatttgaagaacaatgccaaacccaggagcggtacagcaaagaatacatagagaagtttaaacgcgaaggcaacgagaaagaaattcaaaggattatgcataaccatgataagctgaagtcgcgtatcagtgagatcattgacagtaggaggaggttggaagaagacttgaagaagcaggcagctgagtaccgagagatcgacaaacgcatgaacagtattaagccggacctcatccagttgagaaagacaagagaccaatacttgatgtggctgacgcagaaaggtgtgcggcagaagaagctgaacgagtggctggggaatgaaaataccgaagatcaatactccctggtagaagatgatgaggatttgccccaccatgacgagaagacgtggaatgtcgggagcagcaaccgaaacaaagcggagaacctattgcgagggaagcgagacggcactttccttgtccgggagagcagtaagcagggctgctatgcctgctccgtagtggtagacggcgaagtcaagcattgcgtcattaacaagactgccaccggctatggctttgccgagccctacaacctgtacagctccctgaaggagctggtgctacattatcaacacacctccctcgtgcagcacaatgactccctcaatgtcacactagcatacccagtatatgcacaacagaggcgatgaagcgctgccctcggatccagttcctcaccttcaagccacccaaggcctctgagaagcaaagggctcctctccagcccgacctgtgaactgagctgcagaaatgaagccggctgtctgcacatgggactagagctttcttggacaaaaagaagtcggggaagacacgcagcctcggactgttggatgaccagacgtttctaaccttatcctctttctttctttctttctttctttctttctttctttctttctttctttctttctttctttctttctaatttaaagccacaacacacaaccaacacacagagagaaagaaatgcaaaaatctctccgtgcagggacaaagaggcctttaaccatggtgcttgttaacgctttctgaagctttaccagctacaagttgggactttggagaccagaaggtagacagggccgaagagcctgcgcctggggccgcttggtccagcctggtgtagcctgggtgtcgctgggtgtggtgaacccagacacatcacactgtggattatttcctttttaaaagagcgaatgatatgtatcagagagccgcgtctgctcacgcaggacactttgagagaacattgatgcagtctgttcggaggaaaaatgaaacaccagaaaacgtttttgtttaaacttatcaagtcagcaaccaacaacccaccaacagaaaaaaaaaaaaaa

SEQ ID NO: 195 - DNA, 2175 bp, Mus musculus
atgagtgcagagggctaccagtacagagcactgtacgactacaagaaggagcgagaggaagacattgacctacacctgggggacatactgactgtgaataaaggctccttagtggcacttggattcagtgatggccaggaagcccggcctgaagatattggctggttaaatggctacaatgaaaccactggggagaggggagactttccaggaacttacgttgaatacattggaaggaaaagaatttcaccccctactcccaagcctcggccccctcgaccgcttcctgttgctccgggttcttcaaaaactgaagctgacacggagcagcaagcgttgccccttcctgacctggccgagcagtttgcccctcctgatgttgccccgcctctccttataaagctcctggaagccattgagaagaaaggactggaatgttcgactctatacagaacacaaagctccagcaaccctgcagaattacgacagcttcttgattgtgatgccgcgtcagtggacttggagatgatcgacgtacacgtcttagcagatgctttcaaacgctatctcgccgacttaccaaatcctgtcattcctgtagctgtttacaatgagatgatgtctttagcccaagaactacagagccctgaagactgcatccagctgttgaagaagctcattagattgcctaatatacctcatcagtgttggcttacgcttcagtatttgctcaagcattttttcaagctctctcaagcctccagcaaaaaccttttgaatgcaagagtcctctctgagattttcagccccgtgcttttcagatttccagccgccagctctgataatactgaacacctcataaaagcgatagagattttaatctcaacggaatggaatgagagacagccagcaccagcactgccccccaaaccacccaagcccactactgtagccaacaacagcatgaacaacaatatgtccttgcaggatgctgaatggtactggggagacatctcaagggaagaagtgaatgaaaaactccgagacactgctgatgggacctttttggtacgagacgcatctactaaaatgcacggcgattacactcttacacctaggaaaggaggaaataacaaattaatcaaaatctttcaccgtgatggaaaatatggcttctctgatccattaaccttcaactctgtggttgagttaataaaccactaccggaatgagtctttagctcagtacaaccccaagctggatgtgaagttgctctacccagtgtccaaataccagcaggatcaagttgtcaaagaagataatattgaagctgtagggaaaaaattacatgaatataatactcaatttcaagaaaaaagtcgggaatatgatagattatatgaggagtacacccgtacttcccaggaaatccaaatgaaaagaacggctatcgaagcatttaatgaaaccataaaaatatttgaagaacaatgccaaacccaggagcggtacagcaaagaatacatagagaagtttaaacgcgaaggcaacgagaaagaaattcaaaggattatgcataaccatgataagctgaagtcgcgtatcagtgagatcattgacagtaggaggaggttggaagaagacttgaagaagcaggcagctgagtaccgagagatcgacaaacgcatgaacagtattaagccggacctcatccagttgagaaagacaagagaccaatacttgatgtggctgacgcagaaaggtgtgcggcagaagaagctgaacgagtggctggggaatgaaaataccgaagatcaatactccctggtagaagatgatgaggatttgccccaccatgacgagaagacgtggaatgtcgggagcagcaaccgaaacaaagcggagaacctattgcgagggaagcgagacggcactttccttgtccgggagagcagtaagcagggctgctatgcctgctccgtagtggtagacggcgaagtcaagcattgcgtcattaacaagactgccaccggctatggctttgccgagccctacaacctgtacagctccctgaaggagctggtgctacattatcaacacacctccctcgtgcagcacaatgactccctcaatgtcacactagcatacccagtatatgcacaacagaggcgatga

SEQ ID NO: 196 - DNA, 96596 bp, Homo sapiens
cagcctatccttcctgcagctgccccagagcccatgagaaaagccactgcgcaggggagcacagggaacaggagacccacctgaggctcagccctatccctaagcccacataggggagtttactctctggggcaccccccttgcccatgcctccagcaacaaaacaattcaattgcttttttttttttttttttttgtccaaaataaaacctctgctagctctggaaaaaaaaaaaacaaaaagaagtttggtgttttgtttgtttgttttttttttttgtttgttttttttgttttttttttttgccaagtagtattccactgtatgggaataccataatttgtttattctttcacctgttaatggacatttcggttatttacagtttggggctactaaaaataaaactcccatgaatatatatccacaaaattttgtatggacacatgtttttatttttcttgggcaaatacacagaagtggaatcactggatcttacagtggatgtatgctcaacttttaaataaatggccaaactgttttcttcattacatcattttacattaccatcaccagagttacagagttgcacctgttccatatccttggcaacacttggtattatcaacctttataattttagccattctaatggatatgtggtcatatctcactgtgttttcttttttaattcagaaagtatttattgggtacctagagaatacaaaataatgtccctaatatggtttggctctgtatcccccacccaaatctcatctcaaattgtaatccccgaatgttgagaaagggacctgatgggaggggatgggttcatggaggcagtttttctcatgctgttctcatgatagtgagagagttctcactagatctgatggtttaaaagtgtggcactttcccttcatttatgttctctctctctctctctcgctgccttttgaagttgtgccttgcttctccttcaccttccaccatgattgtaagtttcctgaggtgaggcctccctagccatgtagaactgtgagtcaattaaacctctttcctttgtaaattacccagtctctggtattatctttatagcagtgtgaaaacaggataatacattccctttatatatatatttggcccttaattattttttaaatttttattgagttaaaatatataagataaaatttgccattttaaccattttaagtgtacaatgtagtggtattaattacattcacaatgctgttaaacatcaccactatctattccaaaattgctcatctcaaacagaaactgtacccattaagcaataaattcccattcccactcaccaaatcccataatctctattttcagtctctatgaattcatctattctagatatttcacataagaagactcatacaatatctgtccttttatgactggtttatttcatttagcataatatgttcaaagtgtatccatgttgtagcatgtgtaacaactttcttcctttttatggttggataatattcctttgtatagatacaccacactttgtttatccattcatgttaataaatacttggattgtttccaacttttgtgtgttgttgagtactgctgctgtgaacattggcttacaagtatctatttgagtcccctctcattatgattttaatttgcatttccctaatgactaaagatgttgagcttctatacatgaacttggttgccatccatatatcttttttcttttttcagagacagggtctcagtctatgggctacattggagcgtagtggctgaatcctagctcactgcagtcttgaactcctgggctgaagcaatcctcctgcctcagcctcccaagtagctaggactacaggtgcataccaccatactcagctaattctttctttcttttctttttctttttctttttttgagttggagtcttgccctgtcgcccaggctgaagtgcagtggcatgatctcggctcactgcaagctctgcctcccaggttcatgccattctcctgcctcagcctctggagtagctaggactacaggtgcccgtcaccacacctggctaattttttgtatttttactagagatggggtttcaccatgttagccaggatggtctcaatctcctgacctcatgatctgccctcctcggcctcccaaagtgctgggattacaggcatgagccaccatgcccggcagctaattcttaaatttattttattttttggagatacaggatcttgctatgttgcctaggctggtgttgaactcctggcctcaagcaatcctccagactctgcctcccaaagctctaggattataggcttgagacactgtttttgtttgattatttgctttgttttgttcccctggccctggagtgcagtggcaagatctcagctcactgtagcctctgcctccctcaagcaatgctctcacctcaggctcctaagtagtggggaccacagccacatgccaccactctcagctaattattgtattttgtgtagagacagggttttgccgtgttggccaggttggtcctaaactcccaggctcaagcagtctgcccaccttgtgttcccaaagtgctgggattacaggcatgaaccaccatacccagccctatataccttctttcataaagtgttgtgcaagtcttttgcccatttaaaaaaaactgcagtttttttttttaaattaagttgtaagagttcctaatgtattttaaatacaagttctttgttgcatatgtattttgaaaatattttctcccaccgggcgtggtagctcatgcctgtaatcccagcactttgggaggctgaagtagacagatcatgaagtcaagagtttgagaccagcctggccaacatggtgaaaccttgtctctactaaaaataaaaaaattagccaggcatggtagcacgtgcctgtagtcccagttacttgggaggctgaggcaggaagactgcttgaacctgggaggcagaggttgcagtgagccaagattgtgccactgcattccagcctgggtgacagagtgagactctgtttcaaaaaaagaaaacattttctcccaagatagggcttttcattgtcatgacagtgtcttttgaagatcaaaattctcaattttaatgaaaggccaattcactgattttgtttttttcttaagctcaagcttttttggtcctgatatttaagaaatcttttccaaacctttttttttttttaattttttgaagtattgtgttagctcttaaatttaggtctatgatccattttaagttaattttttatatggtaggctataagggtcaagatttattttgcctcgcatatggctttccagttgtttcatgctcacagatgttttggcaccacttgcagattggcttaatgggtggtcctgttgatctgtttccagatctggctctgacttaccagaccctcagaaggatgatctagacagcatttgcattctattgtttcaactgccacaaatgtaagaaactggtgtcaagtttcctttcacccttcagacctttctcccttactgagtgcccatgatgtaccaggaagtctgatagctgctgtattttatacaaaaataaaaattcgctcttgctttcaagcaaatagcacagaaatcttctacatttcatattttatcaactcaactgggataattgtattttaatttttttcaggtgagttttttttttgcaggtgattttgggatcagatattgagtaaaattgatctgaaactataactcatgaggctcatttacttccattctatactggttgacttattttcagagtcttattcctgaagtatgaggactgaagagctaaaagagaaaaaaatccctagagcatacattatgataagagacctttgagtacaggtgattgtaatctgacttgctctctgggatacattaaagtttcctctccttctaatgcttcaacatgaataacagcttgaaaaagctcagaaacaacagaatgggaattacagtactgttggtcttctgaattcttactatggtagtatatttgcccattttcatgctgctaataaggatgtacccaagactggataatttataaaggaaaagaggcttaatggtctcagagttccacatggttggggaggtctcgcaatcatggcagaaggtgaaaggcacatcttacatggtggcaggtaaaggtagaatgagagccaagcgaaaggggaaaccccttataaaaccatcaaatcttgtgagacttattcactaccacgagaacagtatgggggaaaccacccccgtgatgtaattatctcccactgcgtccctcccacaacatgtgggaattatgggagctataattcaaaatgagatttgggtggggacacagccaaaccatatcattcaacccctggcccttcccaaatcttatgtcctcacatttcaaaaccaacagtgccttcccaacagtcccccaaagtctcaattcatttcagtattaactcaaaagtccacagtccaaagactcacctgaaagaaggccagtcccttctgcctataagcctgtaaaatcaaaagtaagttagttacttcctagattacaatggaagtacaggcattggataaatacacccataccaaatgggagaaattggtcaaagcaaaggagctaaaggccccacgcaagtctgaaatccaccagggcagtcaaatcttaaagctccaaaatgatctcctttgactccgtgtctcacatacaggtcatgccgatataagaggtgggctcccatggtcttgggtagctccacccttgtggctttgcagggtacagtctcactctcggctgatttcatgggctggcattcagtgtctgtggcttttccaggtgcacggtgcaagctgtcggtggatctaccattctggggtctggaggacagtggccctcttctcacagctccactaggtggtgccccagtaggaactctgtgtgaggactccaaccccacatttcccttctgtactgccttagcagaggtccttcatgagggccccacccctgcagcaaacttctgccttgacatccaggcctttccatacatcctctgaaatccgggcagaggtttccaaacctcaattcttgacttctctgcacccacaggcccaaccatgtggaagttgccatggcttagggcttgcaccctctgaagccacagcccaagctgtaccttggccccatttagccacggttggagcagctgtggaaaaggtctctggcaagccctagagacattttccccattatcttggtgattaacatttagtgccttgttacttatgcaaatttctgcagccagcttgaatgtctcctctgaaaatgggtttttcctttctatcacatcaggttgcaaaatttctgaacttttatgatgtgtttcccttttaaaactgaatgcttttaacagcacccaagtcacctcttgaatggtttgctgcttaaacatttcttctgccaggtaccctaaatcttccccctcaaatttgaagttccacaaatctctagggtgggccaaaatgccaccaatctctttgctaaaacatagcaagagtcatctttactctagttctcaagttccttatctatatctgagaccacctcaacctggacctcattgttaatatcactatcagtatttttgtcaaagccattcaacaagtctctagaaagttccaaactttcccacattttcctgttttcctctgagccctccaagctgttccaacctctgcctgttacccagtttcaaagtcacttccacattttcaggtatctttacagcagcaccccactgctgctgtaataatttactgtatgagtctgttttcatgctgctgataaagacatacctgagactgggtaatttataaaggaaaagatgtgtaatggacttagagttccatgtggctggggaggcctcacaatcatggcagaaggagaaaggcacgtcttacacggtggcaggcaaagagagaatgagcgccaagtgaaaggggaaaccctttataaaaccatcagatcttgtgacacttactcactaccatgagaacagtatgggggaaactgccctcatgattcactgatctcccaccaggcttctctcacaacatgaaggcattataggagctacaactcaagatgagatttgggtggggacacagccaaaccatatcaggtagtaagtattccagtcaataattttttcatgtttctcttaatatgtaattaacctgcataactcacaataggtgcagattttaatctaagtaatgcaaagattcattctactttcccacccccaacacatcagttagcaggcaggagaaagagaaaataaaaatattgcatagaagaccatagtgttttgccccagggttgcaagcattgatatctcacccattaccaattcccagtcattgaatgcctacagtgtttggttctgttagagaacagaacatttaaaacacttgactctttagatcatgaggcttacattccaagaagccagtactcttcttgggtgatttttttttcccactttattttatgatgtgcagcatcataacatcacactaacctaacccacatttcaaaaaaatcacacgaatgtggcctaacctatatttctaaaaaaggttgaattcattgccagcattcaataattggaaaatagtccataaaaatctgtattttcagcttctctaggaaaattggaaaatttgggctcacattcctgtgcggcaacaattagctaaactctagttcagctgcccgctttaagaccagccatttgtactctactgtacccagagggctttcctaatggcgcctttcttaagtggctcctccaaagcagtggttcctaaaatctggcttcccactggaataatgtgaggagcttgaaaagttactaatgcctgcatttcaccccagagattttgatgtaatccatctggggtgcagaccaggtattgagatttttataagctcctcaggtatttgcaatgtgtagagaaaactgagaacccctgtctaagatagggcttctcaaagtttaacttgcataggaatcacctgataatcttgttaaaatgcagattttgattaagtatgcctgggatagggcctgggattctgcctttctaacaagctcttacatagtgccaaagctgctggtctatgggcctcacttgagaagtaaaggtctaagccatttgtatttcacattggctttgaaccctaagatacattcttaggtttcaagtctaatgaaagctaattctagcactcacaatattgatgtagctggaatgatgatgccaaatgagagtatcctaccatactttggggagaattctttctcagcctatagctactcagcctttcttgacattggggggtccttgacttcttatgccttgtatgtgacacccctgtatcacccctttcgttgcaaattgtacatcttctgctatttcgagctccttgctggtgtcactacctgctggccaacagtttggccattactgattgaaccatggtgtttgggtacttaatgtgagtattttattgcagaggttttcaatcagtgtttccagaagccttagagtaatagttctgaaaccatagggcatgcatcagatcacttggagagcttattaaaatacagattgctaggctccaccctcagcattcctgattcagtgaggacaatttgaatttccaacaaattctcaggagatccagatgtttctagtccaaggatccagaggttctagacagaaggaagggaggtggtgcaatgggcctcttggtcttgttacatgacttcttatcttatagttgtatttggggattctagactagattttattaaataaaaagattatttttaaaaaagcttgaatactgctgttttgttgcctttgcttttgtttcatagaaatcaattgaaggtgaaaataaataaaaatgctaatactagtgatatggggagatatcatcagtttaaaacaaatgaaatactgaatttatttagtatatgaaaagagagccttattttcttcccttgggacactctttatgatgaaaaaacgtaaaggaaatacaatgtacgctggaaataaattactaaagactgtgtctaaatgaggaggtgcatttgggaattttattgtttttaggtttgcgggtgaacagaatcccactgcaatagtgcataagactctttccagctatctccagaagaaggagataactagcaaggttttcactgttagagtttgttcagagcggaacctaaaggaaatactgggaaggtcacagcagtttcatctcagcttattggattggatcaaagtaattctactgcaaggcaaggtatatcattccatttacagacagagaatgcatgaagtccttcatttcacacagtaggtgtgaagaaggtaccttggtaaatttcctatttgctttcagataaagtgtattcttaaacatgatgtgggtagctgcctgtttttgtgtcgcctctgcaagagacatcttggaataatagaaacaccagtgtctgaatagcctaaagtggagcttacttttctgttaggtgagtcacctttaaaaatgatattttttaaggataagcgatgaattttaggacgttcttccctctacttccaacgtccacaagaataaaccaccaaattcaacgttttacagaggccaagtgcttaggttttgtgtgtttgtttttaagagttttcttgcaaggaaactgggagggaactataaaagggctttaggcaaacagggtgggcgggtgcagggctttaagctgcagaaaggagaatctggaaagagcttttaggaagcagattctcacatgttttaatatgaaagagtggcacacgtggtgctggcattccatcttaccatcagtggaaggtttgaaccaacatcaaatttttctggagcaacttaggtaattattacttgaagaatatgcatttcaaaactaacacctttaagagacaatgtaattcacctgcgcttccccgccccccccgcccgcgccaaccccaccccccgccaaccccgcccccgactccgcgaacgccgaggggcccgtggtctgcctgagtgacctccatttgctctgtcatctcaggactagaagccatcagccagcgtacgccctcagaaaactctcttcccttctcgcgggtccgcctggctcccggaggcggcggtgccaggctgccggagttagccagcggcaggctgcgggcgcccgtccctccggttcaccctttcacccctccttcacccccggagcgccaggcgggtgccgcgggttttccgcccactcggaaggcagtgctggcgagaccaggaattgcagggcctctccgctttggcgagctctggaatccgagtcctccccaccccagccactctgctggggcgctaggggctcgaaaaagcctggggttggctgaaagacactcggattagagacgcagccagcctccagggaggtctgaacttgtcttcgacctccccgaacccctccgcctctgcgctgggagacgcccagcagccgggcgggcccgggacgtgtagagccagagcactccgcagcggaggcagcgcgcggcacggccgcccggggcatccccgcggctggggggcggaaggcgagggcggtggcaggaagggtccgccaggcctgagctcgctcccccactgccagccgccggctcggaggcccgaggcgtgcggacggaaaggggcggagccgcgggctctggttggtgtgggctcgggggcggggcgcgcggggccgggccggaggcggggctagcgccgggcgctggagctgcgggcgcacggagaggagtcgccagcagctggagcggagttggaggaagcagcggcagcggcgagggcggcaggctagctgtcggagacggcaagcacggatcgggcacggccggcgggtcgcagccgggctggaggccggtcggaaccgagcgggcaggaggccaccgctgcagcgcgggccccgcagaggaaggaagccggcgggcggggtaggtaggcagcagcagccccgggtgtgtgtgctcgggcgggggaggcggtgcatgtgtgcacggctgccgcgactctcttcctgtcactggcagcggcttctccttctgcagagccccgccggggggaagcgggctggccaccggccctccccgcctccggcatctcctggccgccgggcagcactacccccgcgcgcggccggcgtcctgtgagatcccggccatcctgactcccgtttcccccgtcctcctgcgagctggtcctgcacgccgccggtcgcatttgcccccggagttgccaacgagctcgggcttcctcccaccctccgtcaccgcacacttccgagggtccccgctgtcgccttgctgcagttttccggggcccctcaccggaggagagcgccctggccgctgccttcgtgttgcgggaaggagcgctcccttcccccgtggccctccagctgcagccagggtcgctgcccgggcccttcccggggcgggcgaggcggcggtggtccccggagctcgtcccctaacccccgccttccgaagtttgccgccctcctcttccggggtgggggaagtgcgcctcggggcggttggtcgctggggccctaactcagcgtttattgccagccaagcttgggcaggttgttggaggcatatttagtggggtcttggaaccgcccggaaatccagcttttggaacgtggggcgaggcgggagggacctgcccagcaatatggagccggctggggagagccagggagcctgcaacccggagctaaaatatcgtgggcaattctctggaaaccacagctctaacactagtgagctctaaccacagctctaacctaagctcagaaactgcccctcagatcacaagacaaagagaacagaaaacctctggccaggcactcctgtacagaaatacactttgataaccagaattggagcctgaaatgcaaggatatatgcagaatggctgttacgtgttgaatgcagaatgtgtgtcaactgggtttgggggaattcttctgtttcccggggcgctattaatatcggaaaggtctcacttccaccgttaatcccttgagctgcagcgctgttggtgtccgagtgtgagtctgctctttatttgggggcttcatgattttaggttttttttcttttttctcttcttttcctctttgtcagccagtgcgaagtaccaatggataaagcagttccgggttttgaatgcaacataagattgtcattttggtgtgatgaggctcaagttttagtaatcaggagggatattcacagagcttattggtcaaggcttgatgtggagttatattttaatgcttcattagttctgttacgttttggcaaccttaaagatggttagatattagctaggaagggttggagtgggcagacaggttcatttcttaagcaggttattagaatattagattgtcacagtttgaattactaggaatttggtgacttctgcacagaaggccacaagtatcttttaacattgaaaaaggaagaaaaagcaactcactagctatacaactttttgacagattacactgttcttgaaaaaccgtttagaagaaagcagataagagttttcttaggtgcaaaagttgattaaactttaggaagcaagtgtttttgaccagtataaagaaaataagagtaatgtgtgggggtgtgtgtgtgtgtgtgtgtgtgtgtgtgcgcgcgcgcgcgtgcctgcggctaaagtttgggaagaaatgttggttcagagttaaggtttaagttggaaaggccagtggaggaggctccctgccttgcagaactgctgggtattgtcactgcttgcctcttcagcttttatatgcaggtaggtactagataatcatattactttttccagagaagtggatagatttttatgattgggagaaagtttaatgtatctgatactggcttgcaaagtgtaatgtgcatttacttttaactttcatcttgacttgggacctgttcttagttgcataacagaactctgcagtgtacacactgctatttgatgttttatctgctttttaaaaataatgatatcagtgagtctcttcctatccatgatgctgtatagtcagtgtaaaaagcattttgtttcccatttattgaatgttttttctttagcgatttcttgagtttaaatatactaagcgcaggaaatcctcacagaataaagttggttctgggaaacagaagtggaacaataagttataggaatacatattttgattatagacagtgatgatggtggtatgcgtttatcttttggtaatgtcagtttcacctaacgtgatttttgaaggactttgaattgtaaatgcaaacctactcaaactaacccaaattttgtactgttaaaagttttggccatttctttacatttttccatgactgtcatataatttttaggttgatatgttgattgaacatatcaacctaaattgatatgttcaatcaacatattggtcgttcaggggagtattgtaaaaaggcatctactctgaaagattgttcacatgatcattaaaataggaacaattctagttcagcttttattgtgtttgcattttgtgatttgcaaaatacatgttttattgaataaagagatggtgaatgagcaggctgaaaaaaaattgatttttatgctcaagtagaatatagccagttgagataatgtttgtgttgggttttggaattctctcacgtcaaggcatacacaatgcaaaagatattgtatgtttcatatgagctcctccagctctccctcttgcagggcacagggtttgcaagtgaaggcaagagaatgaagcattttaatgaagccctggaagactagaaagttagttatcaatggaaggaattatcaagttagtttttactttagaaagcagaatataaattatatcacagctttttatcaaaacctaggttttaattaattttcaaagtattcatatcatttactgcattttcccatgcctcctttacgtacaccctaatgccctaatgtgattacttgccatgattctgccaatacttgtatggagttacttgcttaaaagagtggcaattaacgaccatttcatgtacattaagccacatgagctgaaaaaatagactatatagttacttataaacttgtctgtatggcctttatttatcccctaggtgttaggtgtttatttatttgaaaggctagagtgattgtagtatagtgttattggaaaaaatgtctactgtagaaacatctttggagattttattctgctagcattgttttccttaaagtaaatcaaatacatatccacaggcacctgtagtcaaaatagttgtcaggttaatgatcatccaagagagtattgaagtcacaggagtctggccacagtgtgaggaggctccaccagtgagtgtagtgagttaataaagccaaggcatctggaccagccattccttgcctgttgtcttcctccccggatgtcccagtgtcccagcctggggttctgccccaggatcaagggctgtaccatgaggacacagctactcatctctaaatcctggggatgcacacacacatgtacacatcccttggcctctcccaggcctcctttgtcctgacctctgtagagccgtcctctacctcaggtaaggagagaactacatgggcaaagtccacactcagcctttatctatttactccaaaaggggtttaagacagcgggagttttattttagctagattcaggattcacttagaactgtttgcagagttaagaggcaatgcagaagaaaatccctcacaaatgtttgttcctctgttaaatctgaattgtataaatggcagtaggtgacattcaatactaatagaaataatagtaatataatagttgcaatttactagctatgtaactttaggcaaaatatttaacttttatctgcttgttttctcatctgtaaaatagagataattgttgtacttagagtgattgtaatggttaaatgagttgatatatgtacaactctgagaactatgtgcctggcacatagtaagtactatgttggcattaattatcctaagctcctattatcaagtatggagcgaagtgctttatgtatgtcattttgttaatcctcataatgactctgtgggctgtaggtttgcttatagctgtctcacagatgataaaactgtgccacagagaggtttaagtaactttcctgaggttacatatttaggcacaatctgactggggcagctgcctgaatctgaagctcagtgttcatactaaccttgccaagaagtttacagaatagcatctttttttcaaaagaagagagacttgaagtcatccccttcagtcctctcattcctgccccctcaggtcctcttcattgtgatgatgcagagaaccggaatggtcagcctcatggccttttctgggtgataggatctgtctgtccctcaggtcccagaagctacgtcaccctttctcccagcctccgcataatggctactgcgtgcctaagcgttgctgtcacctgggccagggtcattcctctgtgtttcctgcagtaccttcccctcatgttggctgctttctgaagagccctagctccttgttgtgttacctgggcttgtgctacctgttctcctctccctcgccccacaaacacaacaccaaaagggcttgtaggcgagaattacagcctatacagcctgtttacccacaccacacacccagccctgagcatggcagcatgcaacacattctatttagttggttggtttggaaatgaatttgatgtctattatttggggttaatctcagcccattattttcattttattttaattgatataaagtccacataccataaaattcaccctaaattcatcatttcaaattgaaggcaatttattatgtttactaggtgctctgggttgaatgtgtcccccagagtttacatgtcagaaatgtaatccctaatgcaactgtgttgggaggtagggcctaataggaggctgtgctctcttgaatggattaatgtcattatggcaagagtagattagttatcttgggaatgggcttgttataaactcgagtttggccctgtcttgctgtcttgcccttgcaagaggacataagatgaaggccttcaccagatgctagtgccatgctcttggactttccagcctccagaaccaaatatacttctgttgtttataaattacccagtctcaggaattccattataacaacacaaaatggactaagacactaggatattttaattttgttcgtcttgattttcatgatttctgggacaccatgatttggaaggtaaaccatttttaaataatgatttttttaaagactgtatgaatttaggtgaggagcttgacctagactctgaactagcacactgaagttaaaaagatggactgtagagagatatgggctgtgggcccaggaacccttccataccctcctgccttggttgaagacccatttcgtgctgccatccaatgcctaactgctaatttcattgggagatagaatcacatgacttggatatattcttgattaatttaatgtgatttaaaaatatcctgtattcctgcctgtccatcaagttctccaaattcttgtcatttctaaatggagaatggagtaactcaacaaagtcagagagggcttttttgtttggctctttgccaaaatgcctataggttagagggttacacagaaaatctactttacagcagttgtacgttaagtagctgtggattgctatttgtcaaacatcagaaacaattttattttggggaatagaaagagaattgctctgtatgttagcagggacagaaaatatgcttctgattaatgggattgcaggcagtcattagaaggattgaaagactggagaaaaattccttaaaattttgaactgttgcatatgatattatataagagtaagttagtttacttgttcgtaggattcctttataccctttgttacaataacttatgcatgcactagcttggagcctatatcacaaaactgccttggttatttgaaaatattacattgtagataatgttatctacatataaaaagcctttgctatgtgaataatcatgtcagaactgggtaaaaatagtttagtgggcaggtatatgtagcaaaagagaatagaggcatgatagagtgaatctgaggaaaaatcctgttgatttggatagtttaggctccaggtcgatctcggtaggggtggtggttacacaggtattaccaaatacctcaggctgctgggtcttctgcagtactgtgaagaatttgaggatgagagaaaagagaacttcccagtcctctagatgtgacagtccttgtggcagtgccatatccccctaaggaggagctgggttattggaaattgttcagtggaggggcctgggatagtggcaggaggcagaggtgctaaggatacaggtggcagaagcgaagctcatagagcagaaataggcaggattccagaagtgggcagccttccagaagtggtgtgcccagtattcttttattcactagtttatggacttctttcgcagggacacattttaatgaagtctctttggaagaaaatttgcatggctgagatgctgggttttggagttgatggaactgccgagttaaaatagcttttttgtgtgtgcaggtagtgtgaaagagccacatacactatcagtaaagccgctgtctgagagagttaaagaggcagacagacagttaaggttaattggagtgatcagcttgtgcaggccacgaacctgcatcatccacaccaaagcaagttgagttcaggcagtagatgctggaggtgttaaaaatgggacttacagagctagactgcctggatctgaattctagttcctcttcgcaattgctaagtattatcgtgacagagatattttctgtcctatgttaagtgagactactgatagtacctgtttttatatagttatctacacacacacacacatacatatatgactatatatatgactatatatatatgactgtatataactatatatagtcagcatcatcatatcatctaatactaattgggagctatatgtgtacaaactcaatcatcatcatcatcatcatcatcatcatcatcatcatcatcatcacccaatacttaaccggagttttatgtggattaacccattcagtcctcaagaatgacagacgtcaaaatggacatggcagtcaggagaaagtgtacaatgtgcaaaagagtaggggtggctgccttctctgtctagctaagggctctctacatcttatcaccatgctgtccagtccccaccccaatgacttgactgctctccttttttttttttttccacaacattgccctcagaccacttaattgacactgactaatggctggccttgaattaacgtctgcatcaatggatggatgccctgtttgtatccatcttcctggccttactttggggtctcagaagacagaaatggtgtgttctatttaccatcctagagtcatagaagatttgtggttctttttatcagatgaggacccagagttctgcacagggttcttcttacccacaaagtaaggttcttcttacaggtggcaagggagagagaatttgtagagacctttagttctctgtcacttcagacagggattgcctctctggtgtctagcctctaaaagtcatcatgttccttaggtttctatttccctttgcacaaatttagcctcaggcagactcaagcacagcttttaggtttgtaaaaccttgacaagtcctggagccttttcttaatacagagccccctggcaaggaacagcttcagaggtaagctgtgagcaggggcttgcttgatggttcctggaggattgaagatggggaagagtttgttcattatacttcccattctattaagaatcccaccaaactggcccactgggtggctggaataaaggaagtgttaggaagcagctggcataaagatctacccagcctactggttgaggatttttttttcccccctaaaagacatacattgccaggaaaagctaacaaaaatttcaaggcagatttggaggaattaaattattcttaggcacattgcctggtttctaagcatttagggatatgtaaatgttcatgttctttagaggtctctgtctcttttgtacagagtacattagtactaaaaatgagatttgctagttctacattttcatgtgaatttatgcagtgaatattcaatttgattctggatctttcaaaaggaaaggctttctttaaacaaataatatagcttatttttctgatatgctctattggttgctttgatttttttctccgacaactgaaatgcgaagtagagtactatccccaattaatattcttgctccacaaagacttccagtgtttgtttttgcttcttttaatatgtaactctcctaagtgtgttattgtattacagctaagaggctttacccatgtaaagttgaatactttacacttctgaatgccaacataacaattaatctatgattagattttgcttcttaagatgcctccactgacgagtgcctgtaatattaaacttctaaagtgttccactctttaaaacttataaaagctctctttgatatagcccactgaaattgtgtggctattgtttttattgctttattgtgcagccagcttaactgaaacctttgggtggcttttactctttataataaagataacattgagaaatgcctggagtacaaagtgtatatgtgtacatgccgttctcagccatctactctgacttagtaactctctaattcccttgcctccactatgtttaagaacaaaaaagaaaaacacttacatttcacatttcctccatcaagctgtctttatagagtggtctgtagcaaccattgctacttcctctctaatattttttaactccttaagatgttgttgctgtcctcactgctggactggaatctgcgtgatgattccatcatgggcgaagccccaaattatttagccttgactcagtctctcctgtctggatgcctttgcaggatttagtcttagggatcacattttcctacttgaactcttcttccttgtttttgggatgttgtctctaaaccttgactttccttcctcagttacatacattgaacttcactatttggcccttggatcatttttttttttttttaacttttgatttgtccttgtgagctcttccattccattgaattcagccttgcctaattgtggccgattgccaaatccctagcatgtttcctcttctgaatcacagaccagggtttcatcagccactagcacacttgcacaggggtgcccagaatcaccgtcagcccatcaggtcacctggcttctctttgcctgatagtgctccaaactctcattaatgcaggatcaggcaccctttgctcctctcgttctcgccgcacatttaagcatttgccacatcccacatgttctttctctgcagtgtttatttcactcctcccctttccacacctgctgctgccaccctggtttgtgtcctcactacctcttggccagacctctgcaacacacctttctcgcacactgtggttagattgatattcctggagtgcagctctgatcccgttgctcacttttcaccaagccctttccgtgttccacactgtgggctgaattactcacaaactcagcatgggcatgcgtgatgtcctacagcccctacctaaatctctaaccccaatcccactgctccctctttggctccagacggattggactgcctgttctagctcttctcagaatatgacattttcttggtcacttctgtaactagcgtccgaccacacatgccattctgtcttcagattcctgcagttagtgtgctttctccctcgtttgaaccctgcagtgtttagtttctgcctctcttatgacatgtactagtgttgtggctctgtgtactctgagccacattatcagcgataatgtcacattatcgctaagacattgcctcatgccgacactcctcccctctgcccccgcccggtgttcttagaaggcagggactgccttactaatctctgttgtgtcaagcaatagcacactggcctgtgtctgtctgccaaatcgattaagtacttgttgaatggaagtagaaattccaattaacacagatggcaaagtgtgctgttcattcttaagtctcgtttttttcattcctaggtgaagctcgtgtgtggagtgccacggtacaatcagacgacagatggacagtgtgacaaaagtgtcagaaaggattgggcctcgctgtgagagtcagcctggattcaaagtgttgacaagttgctgaaaaggaagccagtgagaggactgtggcacgcagaggaagtggagccctgtcttcggtcacaccattgatggaggacagatggacagccgtatggccagtcacctctcctcttaaacctttggagagtggtcctttgtcctctgctggacacataataggaattctaacacattctctgaattcacttttcataaaaacgtaaaatcagactgctctgtacaaccaggctcaactgttgcatggtagcagatttgcaaacatgagtgctgaggggtaccagtacagagcgctgtatgattataaaaaggaaagagaagaagatattgacttgcacttgggtgacatattgactgtgaataaagggtccttagtagctcttggattcagtgatggacaggaagccaggcctgaagaaattggctggttaaatggctataatgaaaccacaggggaaaggggggactttccgggaacttatgtagaatatattggaaggaaaaaaatctcgcctcccacaccaaagccccggccacctcggcctcttcctgttgcaccaggttcttcgaaaactgaagcagatgttgaacaacaaggtcagtattgatacgtggttgcttaatgactccctttctttttctttttaaggaaaagtcttaagtttgggttgagtcgttatgttctgggcagaagttaccttggcaactgcacctgaattgatgtgtggtgcataaaagcttggtcaatcattacacaactagaaatttgtgtttgtggggttggaagttgttataaaaatagggacacagtatccgagaacctgtttagtgagtgtcgttgaacactattattatagttgtcattgaattaaacatctactatatttcttatttttgtaattggcattataggcggagtattcctagtctgaaaatatgaaatctaaaatgctgaaaaacccaaaattttttgacacccaaaggaaattctcattagagcattccagaattcagattcagtggtcaaggggtataatgcaaatattccaaaatccagaacaacatgaaatctacaacacttctggttccaagcatttcagataaggaatactcaacctgtgtatatctaataataattttgggaaagtggagggtaagtctaatataagtatatttaacatgatttgtatggaaaaatgtagagagtaataaaatgaccacagaactcggctgagaagaaaccattgtttttataacctggtatctacctcttggtttcctctccaggatcgctgtggccaaagctgaaacccaatcctatagttagtataaaagtaaagggatttcacttcctttgtgggtagtgtcatttgtagcattaatgcctatagtctggttcgccttcatgagggggaagaaaaattcactgaatactttgcttaaatggaaaccaccttcattcaaaaaccacttattgcttattggagatggtccatacttgcgcttcaggcacagctgtgtctttaaggtttatcttctgttcggtttcacacagagacaagccttatgctcagctttgctgttatcagctttgtcaaataccggtttcctcactagtaaatcacacgcatttttcttttttctcttgtgtagtcttctttcttagggtctaagaagggaatgggaaggaatggtttaagatgggtgggcctaactgcagtagttatatattgaggagacctgactggcatcacaggatatttctggaagagattctgataccactagtaagctattataccttctttaatgttgccttattctaacacaagtgaataagacaatgagaacagagaaacagaatgcaagggtaagagctgcctttcagtattgagtagtaatagattgggaatattgtgttaaaatcaaggaatttattaatgatacctgaagggaagcccttttctttcccatacccagcccaaagggatacttatttcataaatgttatactttataatgttcaaataatatcttttattatattgttcaaaagccaaagttaatttttctttgcagatcaatcaaaaaaccatgactctccgcacatacataagtgattttatcaaccattgcagcacttagcagattgaagatacatacgtaatcgtttttctccaccaagttatatattttcaccttttattttttttaagttaaaaacgctttcttcagtagcctaattccaaaggaaaagtgatttaatttttccgagaatacagagctttacagaatcataaaaatagttgaattagagaagattatttaaaaggtggaataagggcaccttgtcaagattagttacaaaacaattttataaaagcagtttctaaacaaaatttgcatttgataattgctatcaggtgcaagtttctttggctctggtgtacagaaaagcaagtctttccttataggaaaagtcattttctctttttatatcctaaactattttataatgcttgctttctcatgtaatgtgatgacaattgagatttttagcagctttttcatttttctttaatacatggaaagatggagtgaaatgaaaatttttagcagaattcaagaaagagacccatgataatgtgcataaaagtattagagcctgaatataaatgagaaattagtaataactgaaagattgaaaggagagtgttgggggggggtcatgtggggagtataatactaaacattcaattttctagaagtgttggtcttgtattctcatttaaatattcctatgaagcgagaattcaatagctcctatgagttgcatgttgaattcatatggaaagtagttataaggacaaattttatatgttagaacctgtgagactagtttcttttgcctccgtttgtatttctttgaaaagcttttgcagtgacaaattgtgtgaaggcaagaaatgatagttctgttctattcttaccataattgaattctttagttcttttctttttttttccttttaacaccctccacctccacctgacttagccagtttttcatgttatgctgtgtttattgcatttagaaggttattcctcaccaacccccaccccaggtctaggaaccacatgcagttttgttttgtggacttggcacacctcgttaatgggcagcagggtagacagagggtgcgaggacagcctgcatgccaattgtgtgtctgtgtcctgctgagccttgctgccctctctgtttttaaaaggaaattgtccttagactctggccaagagtacgttctgtgagagattcctccctgtacgatagtgtcttacttttccactttgcttgtatgttcttggaaataaagctgtgatatttaactttttgagagaaagagtcaaaaacccattaggaaatcttatatacggcactgtactttcttccaatacattttgcatgcagtttttaggaagccctggcatatagattgaatgaattgttttaattggataattttggatgtttttggacttaaatacattcagtaagcatggtctgagtccttattttgtgctggaaagcaaagataaaagatgaaatcaaggctcaagagccagcatgccctgagatgctctctcatgcctctcttccacctttggagctgtgctttttctcctctgctagtacagctcttcccctagacatctgcctgactgacccactctcacttctctgctcaaatctttcgtctcatggagtctggctctactcacgctattctatgctgggacctacctctctgcttttgcaaatcattgattacttaacccacgatatcgtttacttattacgtttattgttcattgactgttccctctgttagattttaagctccataaggggagagatctttgtggtcccccattatcctaagtacctaggacagtgtggtagtttcccaacatgctggtaaacaggtgctgctgcagctcatcctacagctatttcactttctgcattgcttttgaaattgaccacgtgctctgaatgtcatgtgcagtcatacaaagcttaatggcccatcttgttttagaaaataacagcttatttgttatccacatccttcatctgaggcatcctgccttggccttaaccattgcctggtatgtctccagaactctttattttcttcccagggcctgggacaggtagttctgctggtgggaaagtgcattaagctgatagtaccttcagtcacttaagccaagtgagtagaggggctgtcatggtcagcgaatatcctcagggcaaattctgtgccctttctcccatccttttatctccttccctttgcatgggggctaaaattgccaatatgaggatgacgttttattttatttttctacaagccagtagagccctatgttatgttcttcggagagaacctcttccatgttttgtttggataaagagtgtgctgggtgtgcaaggtgggtgttacatgtcctcgggtgaggcagctattgaaaggcaatcttatggctctttctgctttagcttgctcagatcctggcatcccatcccgctacaccaaccccattcagccagggtcctgtattttctcttgtacacaacgaaatgagttgattgaaaatggggatatagggatatgggaataaaaatatattcctctgtcatatgtaagccatccagtggggctatttctcaagacagtggttttaactcatactttgagatcctttaattaaagtcatgctaatgcagaatatttagacgggtgagagtctgtgcccatgttagtttgtgcagtgcagtgaaacctgctaacacaagagattacttactgcatacccacctccatcctgacctgcacaaccctccctggctcctcctgcagcctctgacagtggatttcagctggtttcaaacctaagacataaagcatgcatttgacatggcttacgctaaattttgatcaaaatcccttttaaacagaaagaaaaaggccaccattggtgttggttttcatggtttcccaaggcatgttattgttaaatttttcacattcagcatttgagtgtcccttcatggttgttgttccctgtccagaaagcagggctgcaataaatcacaaacattgactacactgtacagaggtcacagaaaatagtgacctgatcccaaattacacacctctgctgagcccgttggtcataacctacgctgtctccttgaggcaaatagtgcttgtgcaagtaatttgctttgcttcacaaattcctgcctttacgaattctgttttctttcagaatatactttctcataacattcttcactcttccttcctacttaagtctttgctgtgaacttggaggtttgtcttgttaagcccaagtgatggggaaaaccacccaatttatggtgctgactgctcattctgcatctatcgaccactctgtttttgcgagaaagttgggtcagttacaggatcttagaagataagggcctttgagctctgtctctaacttctgaccacaagaaaagttcatcaggacattatggagatttttacccaggcatgaaaatttaagtgtttgccctctgtgtttcagtaggaaatgaaatatatttctactgaaatataattgattaaagagtgtgtctggaaaaaacaaatgtgctaattattttgaataaaatcagattagcctaaccacttagggtcacagaatatgtcatttgcatattaaattacttattgcaacacagttcaccctctcatgagcatttatattctcaatacattcttgattttttaaaaacattttttctgttaactttgtttccctaaaaatgtgtaagagaaaggaaagtagccctaattagcgatttgtgtatccgtggttttttgaaaatgaaattgacaaaaagagacaggatgctcacttttattgctttttgcaggagggttcttaccctgagctggcctggccactttaggaattcacaggcacgctctgaggggcctgtgagtagggaggctctcttacccagaggggagaggaaggcatttctccctccttccctcagtctgttatttgaagggaatcacttgaactgctctcctagagctgcggtgacagttaagtccagggttgcagaataagacagtatttgaggagaagaagctttctgccaggtgtctgtttctgcctctgtcctttagaatcacagggttatggtaggcaagttatattttcttatttaagtgaaatgtttgttcagatgcttttgttaaggcttctgttctatacacttctttctgtgttcttttttcaaaaatgggaaaagggtccagtgtccttatatgtatatcctaagtaaagccctcacacacctctgattcaaataggagttatttaattagagggagcatattttgttttctggcaactaagttaatgttgatattctaatacaattttctttgttataaatatggaactctctatttaacttgtcaatagattctttgataaatttgatgtcagtcttctctggtttctaggtgatgcatctttgtctacaacaagagacattctgattagtaagaatttcttctctgagttagaaaaaaaattagaaattctgaaattcaacaacaaatgctgacttacatctgctaagtagcacccaaaaaggggagaattttttacctatggcaaataagagtgccaaatgtgacatcatttacatatccatgttttgattagtaaaaaccaaacagatgttagcagtacagctggctcttgcatatatgtgtatctttgttgctaacagatttccatggggaaggatgtagcactggtctgaagtctcagataggagaagataacatggtgtgatagcttgaaatgaggagcataattgcatgatggattatatctgaatgttttgaggtcttgagtttatagcattcgatatcaaagcagtccttaggctttcaatagaggaggacacatggagggggacaaagtgaactagaaatgggctttatttcaattgcttgggtatagtgtacctaaaatgtcaagttgtttaacagaatatcagactactttataaatgtgttattccttcttaccaatttatgtaatattttatttttactatgaaaattccatgcagtatacaaacagtacgtggaattgtagtagaaacattgttaaaatataactttgaattaaaaacaaaacatggtatacattgttatataatggataacatagtgtatacattgttaaaatatatccttgcaattaaaaacaaaacaaatcagctgcaaacctttgtttaattatgtatgcagaactttctcccaatggctttataccacctaaggcatggctgtgattttcaggaataccctctctggactgtttcttgcttggaggtgtttgcgatgtatttgtatttgtctgtctatctattctcagttggtagattatgtaatgcctatagattattctgtcctgtcacagtttgattcattttgaagttataactgtgaatttattacagcgtattgcaggagacgtaatttgatgatcaaatctgatatccaagatcgtaaagaatataggcataaatgaaatataaatctgtgatatattatttgaatcagaaattccacattgctttgctttctataaattccttaacgttctagttccagtgttctctaattgtaagatgagaagctaaatgctgtctcttttgagtttcagcagtttttgttttaatccttctcttcccaatcagaagaactgtcggagaaataagacccagaaaaattggttctcactagtagtgtttccccaataatgcaacccagaagccctgtatatgagaataagggaatgtagtgagaggatttatgcagagaaacaacctaggatggttggaaagatgtacttacatgacctcattgcacgatctgattggagactggtccatggattgtatgggattattgcttatgaaagtgcccacctggtatcaagtttttgcagatgcatgcggtgtatggttttaagacatgtttcaccagtgtgaatatttaggctctacttctgttggtgggcagttagcaattgctggtatctaaactggtttgagacttactgcctcatttgaacagtatctgtgcagtagcgctaaactcgttgacatgatctgtactgagagttcctacagatttgtttcatatatatttgttaaattttccaaggtaagtagagagtgatggttataacatttgtttattcagacccctctaaatctacctaagaggtaacatgttagcataggcattagacaaggctgcattgtgaagtcagagtgactgtctggggttgtcactgtcatcttccaagctttctcctaaagaagaaaattgacataatgctctcagacttggcacatgggaccagtgccacagcaagcactggttctagcctgctactggtttttggtaaaatgcagttttcagaactactcaagggtgtaataagattaatttttatgatattagatataatatgttaactttttagctattgttaatcttaaacactgatggctttatttttattctatttaaaaaaataatttttgaggccaggtgcagtggctcacacctgtaatcccagcattttgggaggccaaggtgggcagatcacttgaggtcaggagatcaaaaccagcatggccaatatggtgaaaccccatctctactaaaaatacaaaaattagctgggtgtgatggtgcatgcctgtaatcccagctactagggaggctgaggcaggagaatcgcttgaaactgggaggcagaggttgcagtgagccgagattgtgccactgcactttagcctgggtgacagagtgaaagtgtctcaaaataaataaataaataaataaataaataaataaataaataaataattttcaatgcttaagaattttttatcagtaaacagttcatttgaatttttttttgcattcttgtttcccaactatagaaacatagctgaatatttgtggcatcattaatgcataatttcaaagcattttacacattgttaattaaatctcaccatgttctttcaggtagcaaaaagtaagtttatttttgattcagaagtatttgaagaagttagaacaagatgattttattgctaaataataaggaatatctgtggagtaccaaggaatgagatataatgaatttggttagagtatatcaaagtacatattatagtttttgtcttacacttccctgtgggtctgtttaactattgaaaatgtcttcttcaaaatgaaccttaaacatttgcaaacttactctttgctaattattctgccaggcatttttttttttcttttttttttgaatcttgctctgttgcccaggctggagtgcagtggctcaatctcagctgactgcaacctctgcctcctgggttcaagcagttctccagccacagcctcccaagtagctgggactacaggcacatgctgccacgcctggctaatttttgtatttttagtagagacagggtttcaccatattggtcaggctggtctcgaactcctaacctcaggtgatccacccacctcggcctcctaaactggtgggattaccagcgcgagccaccacgctggccctgccaggcattttatagacatttttcatttgacgctcacaaccaccctgcaaagatggcatattataacctttttttgtttgtttgtttgtttttttgagatggagtctcgctctgtcgcccgggctggagagcagtggcacgatctcggctcactgcaagctccgcctcctgggttcacgccattctcctgtctcagcctcccgagtagctgggactacaggcacctgccaccacgcccgtctaattttttgtattttttgtagagacggggtttcactgtgttagccaggatggtctcgatctcttgaccttgtgatccgcccacctcggcctcccaaagtgctgggattgcaggcatgagccaccacgcctggccctataaccgtttttgagatttaaaaactgaaggtcatgtgattgtgtaaatatttaaaaagtgatcatattaaaaaatatcatagtgatggcacattgataagattcaagaacattttgggcaaggcaggcagtcatgaggatctccttaagcagtctcttgtgaagtgatcggtaactgaattttgctttttgggtggtcttcaattatgtctgctttatctgttaggtttcactagctattacattcatgcaactccagaaatttacctccaatttatatgtgacttacaacattttcttatgtctggtaaatatttgaaaggattgaattacaaagagacggataaggccatgaagctaagacaaagttttgggtatgtgcatgtaaatgcaatttttctcaggaagaaatacaccatgatcagataactcaaaagttttataaccttgataaatagatttaccttcgtttctgttgtttttgaagaagttaaatgtctgctttaaatgtttccctgagtttcaagttttcttatttcagactcataattatatcattttgattaaaatggagcacagactggagttattacttgcttaaaagccaaaaacttgagggtatccagcataagaattgtgtgttttggtctgtggatagcagctgcttgaagtccataaaaacaagaaacctgaagttgattcagatgaatctgaagtcttgtacctgaattatgtcaaggttagcagtaaatgccatttaaaaagactgagtacaaattgccaaattcctttgaatgccaaaccatatttctcaggaaagttggccactgccaaatttataacatttgtgtttctgttacctgaattccaagggcagaggggtgattgagggggtaagggaaaggcacaggtgaattttattttcagatgtctaataggacagtgtgacattgcccagagatagtctctcaaaggtagtgagtgccagcagaacttctcgaatgcgaagttgagaaattttacttatttacttattttcccattgaaaaaaaaaaaaaaaactttaaatgttttctgagttaaaaaggcctctgactggtagtcctgacacagcttcttgagagtctccgagagagcctcttctcagtacaattcctaagaagataggaagaaaaaaaaaaatattcttaacacataaaactagaattagtgggaagaaatgcctactgtaaactcaacagaaccggggttaaaaaatataggataagttttgactacctaaaagtagcagggcagacccatctcttccctaactctgtccataattcagaaagggcccagggaactgtcctcaggaatgctcttcccccctcttccttgtcctctccgacagagcctttctaatcagtaggaggtcacaacttagaaaataaccagagagagctggaatggtaagttaggggctattactgttatattctgagaatcctgatccatgaaaataaagtgctgaaggtggggtagagttagaaagacctgtgttcactgagggttttgagtattacaggctctccatcactcagagcatcagaaagtcaggcggtgaacgcaggagatttttctctcaggctaaccaaaaccatgttgaaatgaaaaccactttggaattggccttttcgtctcagactgccaaataactagcacccaagtggatcccttagctcagagcagtcaccaggcatgggtaggtctttccttgtttagtgataaacaggaaaaacctaaccgagcctactgaaccatgtccatctataaaagaaaaagggagatcatactggagatttgaaagaagagtagacctccagaactgattgattataatttatttctgttatagtatttccacttagtattatgatttatttctgtccctcatgaaagggacagaaagtagtcaggcggttatgagatgaaaagacagtaagatgggatgaaatcggagtgaaacaataaaaaaaagactaagttaaaaatgtaatagcatattaaaattcatgtgtaagggggtaatgagctgaaaataaagtctgtgttttgaaggagaaacaagataaagctctttggaatccaaaggataaaaacataaaatgagggagaagatatatagagagaatatctaacaggagaattacaagtgttgataaacagggaaccaagtgaaatagaacaacatcattataagaagttttcatgcacgtgtgcagatttgaaagtgttgccgtatttttcatgtgaaatcaatgaaaaatatgtttgggcatttctatttaagaataatgttaaagtaccttgccaaaatatctggcaagatattagctaccagggaacaaagttgtttttcttctcctttctagcaataaatgccaaaaaaaaaaaaaaatagtgcattgattttagtagagttttgaggagaaaagatggtgacttaagaacttactgagcttcctccttatatgttatgtggaaaggcaattgagaggcattcgttgataagcaggagctcaggaaagatacactaaacctcttgttcacgtgggagtacctaaaggttgcctttttattgttaagctttataatttaaaaaggtgtaaatttaaacttaattcattttggttaacttcagtaattatcaaaataataaaactataaagtatgtatcttctaaacacctagaaatatatattccaaaagataggcaacaaagaaagaataaaaataatacagggaaaatgtttactatatatgactactttaaagaaatacagacattaacatatgtatgtacgtatatacacatacatatatacatataaaattgaccatatacatatatttgtgtgttcaacacacgcattatttttcaggtactgcactaaccttttattccattgacttgttacttttcctaagaactctgtgacactggccttattatacctgttttaaagataaacaagtttagttagagatggcccaaggtcacacagctagtggaggagctgggatttgaccccaaacagtctgactgttgacccaatgctcttaagcaactgtgcaatacagcgaaaggggcgccgggggttaatgttcacactgcttgatgctgctgacttccgaccagccacaaggcaccccggagccaaaggcagatgactccctggcttgccagtgacgtgtgatgcggtctgatatgacaaagtgagttaaacaagcagatttttcctctcaggaaacagacacaagaacaactgaaaagaataaagcagatgtgtgagttactattccttacagcaaaagaacctcatcagaaccgcaggctggaaagaggtgattacttttaaagggcagttcattcctcctgcatgttggaaactgtggctcttaactggctaaaattttaactttcagtgtagccctcacttggcttgtgcttcttaatgttgtagataacattatagatttatataatattcaacttttatatatatattacttatatataaatgtttatgtataaatatatatttgtatataatatgtattcgtatatgatatgtagtaaatgttatatttaaaccatcatatagaaaagccattattgggtacactgtacaaatctgcctttataattgagtgtactgttctactaaaagcagctttagagaaaggattgaaagccagctctttctacttcactagccttcattgtttggattggcattatgtgtacagttatattgtaactgtcacttgtggtctaatcttccccttaggggaaacttgagaaacctggtcagctttaacatttagaggaagtttaaacatattggagcataaaattcacagttgtttaactgaaactccagttcttgtcagaccacatctctccagcccttctgtgattggaatcatctaactttggccctcaataaggaaaactttgacaagatgcaaaaaatgtttactcttgttttctttgccaggaacctgagtctgcagcagactctgagacctctttgcctgccccaaataagtgaattgtcactgtaactgttttttatccccataactgctttcggtgaatgccaatctagttgttacatgcctttaatattttgggtaattatgttctttaagaatgaaaatattttttccttccttcctttcttctttccttcctggttttgttatagtctagctgtgagaccagttgcctttcatatattctagaagagaaggatgaggtgagtttcacagtgatctttttccaaaatacaaaaccactgtcactctccacttcccaggcaaccccactcattctattttctagtgagggttttgcttagatgatgacgagtctcttgattcagtggactcctaagggaccatctttcaccagcaccaaatgctgtttagttcacatattgaaatgttttaaattataacttagcaattgtagttagtaatcttcacattatattgtctcacatttaatgtataatttcctaagagaaggaaatggtcctggtgggggttaatagttatagtaactattaataatactgatgactactagttaatagtaattaaggcctcctaaaatgagaggaaaaaaaatcttttgtttataaggtttaaaaagaagagttgatacttaatagttttagtaaaaccccagtgcatgttcgattaattttgttactttattctgggcatgtagttgaataattacctgcatttttgatttgctgaaaaggtggtggttacaattttttttgtttttttttttttacagtactgtttttagttcattacattgagatgctacattttccttttcttaaatacatgcaagatgaaatgttttacctctgagatgaaaaatttgaaatttctttaatgtgactccttactaacacaattgcaggcaagcattgaacatttgctttgttccaggcaccatgtgctgtgtgctctacctacctaatctcacttagtccacttagtgctatttgcaggttgaggcttagaaagaaaaagaaacttgcccagagtccaacactagtagctggtaaagagctggtctttgcatgcagcctctctcacttcaggatgggtgcttcccagcaccacactgtaccaccctcaagacgagttgcaggaggaaaggaacctctagtggtattaactaaatcttagcaagtagttgcctgtaaattgtagacttttaaatacaatctcacatttctgtgatctttacccatacaccagttaccttcaaactaatttaagaatcttatagatattaaaaatgcttgattggccaatatctcatttctgtcaaaatcatgtactagaagcatgtatcaaatcagagacttatttatgacaatttgcacacacatttggataaaatgcatcaacttctttcaaagtttacttgaaataaaaagggaagaatacgaagtatcacaggttaaagcaatgccctcattccatttaggcaaaagtgttgtgctatttgaatagtgttagtttgagaatatggagttgtactccttatagcaattccaacctagaaaaatgtttgtgttttaattgatgggttaggcaaaaagttaatctttgcatagaggaaagaaacagctctgacttagaggtcttggggctagaacatggatcaagtgtctgaagtttttcatgtggcctcaagttgaatcttggtcagagaatacacggtggtcaaacttcacaccatagtcataatgtatgaagccaaaagaaaagtcctagttgctgggtgcttccattatatcatcaacctgggtttaatgattttattggaagcacgacttccagtgaggcaaggcagtaagccccagaagagaggccttccatgggtagataggaactcaaatgctttcccaggctggacccaggagactgtgtcagctactgtgatatggcttgccaccaggacagatcattctacccgtctaaggagttagggtatccccaagagctgtgatgggaggtggaaattcacacctgtgaaatgggaggtatgctgagttgaacgggatagcccaaggcctgtccatgaactgagccatggccaaggatttcttaattctagaggcctccttcttgagcttgccttcttttgaacttggccctcagtgtctgggtaagttggagcgtgactatccagggaaagcccctggtttgtatttagtcaagttggccagagaagactggatctaagcgggaataaaatttgctgacccccatctcagaggttaacattttcatttgtgttttgcatgactcattttaaattacagtgctctacaagtatagaaagaagccttcctcttcccaccgtccccagacaccacataatggaaaaagcaagaattttctgcataagcaaggccttaaaaaaaaaaaagccagcctctgatgggacttctttcctgccagaaatcccactggtccactgtcgcaatttttacaaaaggccacgatgaaagagtaaggcccattttgagccctttgcttctgtattatgtgaaacataacttgtatttctgttcttggtatcagaagaattgttagtttttgaacatgtaaaatctactagggtctctgactgttaaagtataattttgattaagaaaagatttgttccactgctttgattagacacataaaactttgaaaagttttgatgttctgtttcctgttttaaaaaaatatgtcctctcctatgaactctaactagatgagaggattttcctcagagaaaattcagccctgggaagaaccatctatggaggtcataacctagaaaattcttcaagggaagttgcagtgaattaaaagagggcggagttagaaagtcctgttctaccaaatttgtgctaatagttgcacctttctttctttcccagaatggtcactggagaaaatgtgtaaaccaactgcaaacaagtttatccgttgccacctttcttttcctttagtgacagttcaattcgttaacctgaaggagctactgtaccatcaagactagctcccagcccagggcttcagcataaagcagctgctcagttaattttggtggatcacgggcagaaacaagttacctttgggatgcagattctgaatagtctgccatgaaatgattaaatgaatgagagtgatgaggggctacttaattggactatgtaaaatggctccttaagcttcgtggacaattgagtaatttcagtttcctctcttcactcttgtttacttcctgctcttctagcatcaagtgttaggtattctgttctcttacaatgagaagattaaacagctgtagtttaaattaaagcattaatttggagtgttctgtggctacattaattatattttctactaagattaaattgcagatggatataagcagcaatatatgtttatccagggcaaaccagaattctgttaaccagccatccttggtgactttttatttatatataaaaacctttttaaactgaaataatgtaacttgatttttccccccagttaggtagaagaaaaaataattggatgcagaaaacagttgtatggagcgtatttgcataggtacaggacttgagtgacagaaaattccttttatttttttccccagtgggatttagcaaaaagcatgtgttgaaagtctcttgactaaatgggtcataattaaagactttgggatttatttatgggtattttaattagaaacattaagttcactcagtggtccttgtgaaaacttttttctaactgcttattttatatcaagtaataaataaaatttctgtgggtatgaagatgagttttagggctgcctatttctctaggactgccccccccccccccccccgccgccgcttcagagagcttttctctttctttcacctattaaacttctgctctggacctcaaaaaaaaaaaaagagttttagctgtaaccacattgtaattcgtgctgaatatatgaatgctgctgttcactgaatagttaactggttatatcccttgttaatttgaagttttcttccttcgttttggaatgatagttataaggcaacatgcattttagaaaaatgcacttgtttgaacttctcagatctaatgtgactctgtgggactagatgttaagaaaccatatctttaactgaacatcatctatgatattccatctcataacatgttccatgagttttatggacaatttctaagaaatccaaagtagcatgcagttttatcaacctctctgcatccccttggcacaaggaataatttttctgttattgaggggcaaaacagaggggtaaaggcactcatacagttaaatgccagattaagtcaggcatccaagtcactctgctttgggttgattctctgagactcagctggctgacttcaaaaggacgaaatagatttcaacattggaaaagaatacagtatagaatatatgatgggtcttgttagctatctcttattttctaatccaaagagcctcctagttggaggaaaaacttgaactacataagtatatcagcaaattttcattatattttataattctttattgcattatacgtgaatatatttagcagtggtagtacgtcttggaaagtttaagaatttagacaaatatgctttttttttaaaaaaaaatagttgagttttaaatatgctgtttgggtccttatgagcatgtgggagatatataggagaaagagtttgttgctgatgttatagaatcaccaatgcagcattgcacttttgttcttttccattcattgttcttgcttacatggagcacttgcaaataggctggacgtctcagagttctgaacaatgcccttggctaaccgttagtcctaattgctgtgactaatgtgctgtgtgacctaaagacggtaacatacttaaccttggttttctcatctgtaaaatagaattgatgacctctaccaagccaaggatttcagtgaggcactcaaaaataaaaattaaaaaatacatttgggacaaacatgaaaaaaattactttttagacttaagcaatgcatttaaacctgacgaaaatgaaaggaattgaaattgtttagccacagaaaataaagaccaaggaccaatttaaacagttgaaaattatatgaagcagtgttttatggagagtagtaatgaactcttcttcaccttttttgaggctgtccaaagaagaaatgaagttagattattgcagaattacataagttagtaagcatggactgaccagttctttctaagacacatacttgagtatttattctcttcagttgcaatgaaggtgacagtgaatttgctgaatagctgtgtacatgtttccccaaagagaccactggaataaagttttgtttcttgagacagtttccattgcatttataagtcttgtcccttgaaggatgttttctggtaaacacctgtattctttttacattatatatcttcattaccgtacaagtttggttgtgagccattccaaagtctttagtatgctgtatgggtgtattctatactttataccttatttggaagtcataataatgtcaaaaccatgcctagccatccccttccctgcagagtctcttttgctttgtccacttggtgtgtatattttttttttttttttttgagacagagttttactcgtcgcccaagccgcagtgcagtggcgcgatctcggctcgctgcaacttctgcctcccgggcccaagcgattctcctgccttagccccccaggtagctgagattaccggtgcccgccaccacgcccagctaatttttgtatttttagtagagacagggtttcaccatgttagccaggctggtctggaacgcctgacctcaaacggtccatccgcttcagcctcccaaagtgctgggattacaggcgtgagccaccgcgcccgtccatgtgtgtcttttttattttttgttttttgagacggagtctcgctctgtcgcccaggctggagtgcagtggtgcgatcttggctcactgcaagctccgcctcccgggttcacgccattctcctgcctcagcctcccgagtagctgggactgcaggcgcctgccaccacgttgtgtgtctttttaaaagatttccaggacttctttttcctttacaaatccaaaattgcagtagcttaataaataacaaatattttggttttatgattactgtcaaatagctcattagtaagagaaaaaaaaaatgctgagccttaagaggggagaggaaaggcagtctttctgaagctgaatcctttgcctaaattgtcttagcaataaatcttgccacctattggtaaaaaggaagaactaaaactaaaaggtgtttgccgttctcacaggtagttagtagtgtgatcgaaatagaattctttcagcggtgcttttggataaggggcttggaaatatgtgatttgatatggaacttttccctgtgctttgaatttatcatggctcatctctaagtcataatagttttttgagtagaggaggtatgctgctctcatggtctctcttaaaattatattttttgagatagaattccattttaatagatcagtggattttaattggacacattttagaggcttgattgattttgaaaacatttttcttttttctttctttctgtctttctgcctttctttccaccacggctaactgcagtctgaacctcctgtgctcagttgatcctcccgcctcagcctcctgagtagctgggactacaggcgtgcgccaccatgcctggctaatttttctgtagagatggggtttcaccatgttgcctaggctggtctcaagtgatctgtctgcctcagcctcctaaagggctaaaattataggtgtgagccactgcacgtggccttttttttttttttttcttgagacagggtcttcctctgtcactcaggctggagtatagtggcatcaacatggctcactgtagccttgacatcttggggtcacctgatcctcctacctcagcctctggtgtagctgggactacaggctgaaaacatttttctaactctgttgttagtttgggctttccttcattccagcctctgaaatccattatttcctgcccaacgggacaggccagtggtgacgttggcctttggtgccagggcctgtttttccagatcatgggcaccatacaaagataactgccctaaacggcatcattgccccagagtcattgaatgtccttaaggtgcatttgataaaacaaaaacagttttttgttttgaaaattctcaagtatttccatactgggaaaatgttctttttttttttttgacagggtcttgctctgctgcccaggctggagtgcagtggcgggatctcaattcactgcaacctctgcatcctgggttcaagcaattctcctgcctcagctgggaccaccggcacatgccactaagcccggctaatttttgtatttttagtagagatggggttttgccatgttggccagactggtcttgaactcttgacctcaagagtgacccatctgcctcggcctccgagagtgctgggattacaggcatgagccaccatgcctggccaacaatgttctttttaatggtgttttccccactatctggatagatatatgaattcagttactaagatgacttagatttaaatataaaacactagcatagcagtttttgattcttaatattatcttaaatccacctcccctcattgtcctctgtatctaaacacccttcaattcttgagaaaattaagattaccaaagattagtaatctatttgtgattgtgtgtgttggtggacatcctaacaaatttatgaataaagccaatactgttttgttagtgtccttattttttctttacgtctgttcatatttggaattctaaggcactacccagataatcatttgataccctttgttggcatgacatgtttggtcaattgttttggcaaaattatttatccaccactgggaactaagcactgtaacaactaaagaaagaggtcatacaagggaaattggaagaactatatgttatttgtttcaatttttatgtagtacacctatatatgtgtgcaaaaaaaatgtaaactgttacaaagcaacatattgatgaatttaaatgagtagagcataataaaagcaaaaaccaaacagaagagtggttggagtgaggccataataaaccaagagatattttctgaaggaagtgaacatgtttgcattttccagcatactgctatggatgtcagcgttaggctaatacatagtattgcagcgtgattcaaaaaggtgagatagaggggaaataagatagcttcataaatattaccaaggaatttaagacatgagcattttatgtagggaggttgaaatgcattgttataatcaggctgtgtaatttccttctgtcaagacctacccatttaccagtaatgataccttctttctcttctatttttgtctcttcctttaggaaaaggaatatatgcttactcattatttaaaattcagagtcattttcctgttccagttggttttgttcctggaaccaccaaagaagagtagaattaggtgcatgtgaaacttttgtttctgctttttctactcaatcaacttttatccctttttaatttttactctctcaaccatcagttctatatcatggtatctcttcttggtctttttgtattatatttccataaaaccagatgtacggggttgttaaaatactgcctggacatattatctaccctgcactaagtggtcctatcacaaaatccagttaaacacacattgaagtatttaaattgtttcttttttaaataacatcatattgggcattggacttcttaactaaactatttctttcactaaatgacattggttaattcaacaagccattgtaggaattctgttaacccagtagcttctactactatgttactatggtaatgacttagcttcccataaagctgcatttaaataggtgtttatagtcaccaattaccaggtatttcaagtactctttgaaaggggactgcttgtggtggggtggggggcgttaacatagatactttctcagtcacgtagccatttgaagtttttcaggtagaagacagttgatagactatttggtgagcaaatgaataactggatgaatacccatctgggaacccctaaagaactgaagatagttccctggccaccactgttcacagtcatctattatgtgcttactctatgccaagtgttgggctggattctggggtcaccaaagggaagagaaaattttcactgccttgagggtagctaaaaacttaatggagggaagctgagagcatgagcgagcgtgccaccccagctgggtgagcggcacaccttgggaacagctgggagacccccagtggtgtgtgtcttccttcgcccttagcacttgctcctctccagctcactatgtttcttttctctctggggtctaaggagcttaggcttcactgcctgctcctcagattgtgggagcaggagcagagagtgggtgcctgccacgggacagggggtcctagagacaggccccagcatgggaaggcagtggaaacccatgcattgctctctggcattgccacacgtcttctgctgcctgccttccagccctttgcttttccccagctccgtcagctccttgcctctgacatcagtgatgaaagtcaggcgtggggggattagattatttccattggccttgatagacttagacatataatagaagctatgataagtgagttagttttccatgtttgtttactgaagtttatattaccctttatgtcaccaaaacatgcccgtttgcagtcattgccagtgtagtcatgcaaaatcacttgagtgaaatagactttggggatctaatctcaggacctaaccaccatttataaagcttttttggggaaaatgtgttctggatttcgcacagccagcttacaaatgagctttggaaacacaatccacatgtaagttggagacttcctattattagcattcagccctgcgaggagagcccttgctttgttagcaggcctatgtgtcctcagccctaagttcctaaaaccagcactacttgaggagcttgaattggtgctcttggagttctttagattagttatgagacttcagaacctgcttaccagcagtactgagctcaagaggaagcctaattcatatccttcagaagataattttaagagagtgtgtatgttttcgttttgtgaacaaaggaaagttaatctggtgctccgtgtctgttttgtaattccccaagggagaaggaaagggagggaaatgattgatttccagataggataaaaaccagtcagcacacaatgggttactgccaccgctttctgataaggatcctacttcaactatctgaagagattcttcaaggtggaggatacagtggttatattagttactctcacccttgttattatggaaggtaaaattcctggatcctagatttaattttaaaatagtaatttaataatgtctggtggaaacctcttaaaaaaaacactttgcagcacatctctggtagccctgtgcttgagatgacttttaggctgccagttcagaagatggaagatataaactgtgttgatgagttggtttttcagtggaccctgttaggttccttttttaaaaaaataataatttttataatgagtatgtcttcgtgagccctcacaacccttgaagtttttacttgtttggcagaactaagggcactgaacgtttgtaagccgttcactaacacttacaggaagggcataaaagggtgctcaagtcagtctgtaggtggtgggggcggggtggaaagaggggattcctgtaggcctggatgaatcagccactgatttctgatggtagccccagctgcaaaaaagtaggaagctttttttatggacagaactacaactcctttctttcaagtttttcagccttttcacacttttccattcttcagactttgcaagtttttaaacaaaatgtttgtatttccccaaaggaaatcacacagttgactgcattatgagagggaaaggagcaaactctgtctcatctgaggaggggctcagatcaggagttgtgtagggccctcacccggttgggggtggtggagccttggctgtgtgcaggagtgactgttcttggagatgttctggttggatcatgagtttgggcttggaaagcactgcctcaagttcatcagcaggaatgaggtagaattcactacttgctgtcttaagacctttctgtctgccaagtgtttgagcaatccctcacatctcccccttgaactaaagagcaacaactggtcaagagcccagcagggatgaaaaaggttggccccttgcatccttcatctgctgtttagactaagggccgcattgtagaccactctcggccatgctgtcctgaacccgaggatcagcagaattacaggcccaatttcaggcagacgtgagcttgcatctgatgacaggcaagtacctacatgtgtctttcattactccgctgccttaggagatgctgtttaagttggcagatatgcttatttgaaagcaaagcttgttgctggtgagattactgaatttacaaaaaaaaaaaaagtggggggatcagatgccaagggagagggaagggagtgtgtagcatttaaaagtgtggtgaagccatcaagttaacaagaaaaagtagaataaaatgtggttccaatttgttgtactgggctcaagatgataatattgcaatagtaaactgtagggatgtgtgcgtgcaaatgtgattacatgtgtgcttgctttctgaatttcaaaattgtagaagttattagaagttttaattttagttcccaatttaatttactctgatagtaaattagtaattttcaagggatttactgataatcagaacaaagatttgcaatttctaggacagatccccaattttgggggtgggaaggagctactttgtatttccctgaaaccttgagttactggggccgaacatgtagggcagatattgaatgaccaatcctaatgctcttagcaactttgctaagtaaaaccccgctgccatccagtggcaattggctatacggcatggtagctgtaaaatatgcccttttctgccttttctccctcagattccacctttctcagatgctcccagttttttttcccagatggcacctgacacagtacttgacaggaaaaattgactttatgtctggcttaggtaattcagggcaagtgtgcatttatttaccttgtctcttctcctagcaatactaatttttatctacgttgcatttttattttctccccagatttgtcataacacacatactttttccttgaatatttttgttaccttagctaaagaattaatgcattgtggtatttctgcttgtcatagttttactttagagtagatttcgcttatatctttgtatttatgctttgagctgtggtttaccaatttcctagcatgtttcatgacacttatcctacatttcagacaaggatttatgtgtcccataggattcaagctggacttggagaaagagccagctagcaaatggaattattctgacttgtgaaaggttccagccttttaaaactaggctctgagaaataaaaaaacaaatattcttgggaagaaactgggtttgtgagtacttggctagaaattttaggaaaggaaagaacatttcctctggcctcgggagcacattcaatgtgaaatattgctgcctttaaaagagccaaacttaaatttctatttggatcatttacttgacttaaaaataaagggatctatttttttttaaggttcagaaccctattttaaataaaatgacattctagtaagtcaggcaagatgcccccaacatgagctattaattaaaaacagccggaacttctggaggtgttagcaagtatctactatgagcttggggattggcgaaatctggtacaagttagttccagctgcgcacatttgccttattacagttctttatgataaattaaatgcatgcttcatacatcctttggtgtagtcatattctctcagcacttgactaagcaggtggaaagcttatttagtcataggatgactgaaaacaatgaactataaacccatgtatatccactccaagaaaagagctaataaatgtcatgttttttattttcccgtggaccccctttttttttttttttttgtattttataacctttccagaatcttgagtgatttttaaatgtttgccctttggtcataaatgcagcaagtaaatgtgagtctgcacactcgaatgttatataaatcagttgaccagtcagtgttggagcaaacttctcaggattgctctgtgaactccctgttctctggcagttgccaaatacaaagataaaccaggagagacttattcccaagaaaagaatgattctgcatccttaacttacatataaactgttgagatgtttcattgttttgtatggtcaagccccttctcttgttctctctcttcatcaattagtatggaaaattggaagtttactgaaaagagtttcgaatcatgggattttagatttgaaaaggaccagagggatcatctactcttccaacaaataaaaaataaaacccccaaaggaatgaatgatccatggctgggacattggaatctctctataaaggagaaatcatattaaggtattttcatcttaggcctctaaccccaagggtatctttacaaagactttattttagtgaagccttcaataaacagtgacctcatgtcaagaattctaaagagagggttatggaatattggtttgatattaaagtcattgttatcttggagctggcctgaatggactaataagtggcctgtcaccagttgtaacttacttttacaattttaatgtgatttaagggaagacactcttggaaatgcttagttatggttcatacccataatcgtgtttcttttaggtcttaaaattttatataatacaggggagtagattgcatcagtacagtctttttctttttttctttttttttttatgatgcaaacaaagcagtatcttaaattaaatcaaggtttcttaaggttccagattcttattcctaaattttccactgagtaacctccaaattcttctcctgcctttgtccctagttgacacaagtcaggccacaattttttttctgcaaatggacgagctgctgctcagaggctgcacttactggtgagagatccttcaagggaaatgaatctggaatggcctggaacatttgtctttgggttgctccagggctttattagagcttctgagatttctaagtaggtgatgaaatttagcagcatctgattttctaaaatgaccaaaggagaattgtttcagtccctgatttgcaaagtactcactttttggtcctctcaaaatttttgtcagataaagatttttccgtgccatggatataagaaataacccactcttaccgataaagggaagttagtgttgtaaaggaacaaatggtgattcaggtttgggagactttggaggtattcattctccactaagctatatcccaataccatcattatctgggtcagcctccgattcagcctcatcctgtgcttcagcagtggggtaaaacaaatgtcacttgttagctgcttcttcatgaccttcatagactatgcattaatttgaagccctgcccccaaaaatagtgcttgggggggaaatgagttagtgattttgtgaagataatgggagttgaggaaaacacttaagtttgcttttctgagctctagcttcattttacttctcagtctcagtatttaattgtctccactgttttttctaacttggaaggaaatcagatggcgaaagtgaaacatacggctatcaatgtgaaaaagctgctccctatagcactggaattctcttgtcattaatagctcttgtagtcgacagattataatatacagagtcataaatgttcttgttgtcatttggaaaattacaaattcccaaaaagtggtgattatttggggctttgggtctgcaagacgtttcacattaaaatgctgataatatcttcaaaaaccacagagccatgggccttgcaggcttggtaactgactgcctttgtggtgtggttttattctttctactgaagcacctggttgaaaggagtgggatgctgaattcataggggcgtgttcacaaaaatctttaacatcaagtatctgtttattcaaaatagtgcatagttcaaagcaaccttgattccttaaactagatgtttttctgttctttaatgaaaacagcctgaacgtggttattaatctgagtctttctccattctgaccaccccactctgtttttctctttgaatatcaaaaaaaaagtataaaaacattttgtaattttttatttatttatttttgttgagacggagtctcgctctgtcgcacagggtggagtgcaatggcgcagtctcggctcactgcaagctccacctctcaggttcacaccattctcctgcctcagccttccgagtagctgggactacaggtgcccgccaccacgcccagctaatctttttgtatttttagtagagacagggtttcaccgtgttcaccaggagggtctcgatctcctgaccttgtgatccgcccgcctcggcctcccaaagtgctgggattacaggtgtgagccaccgcacccagcaacattttgtaattttttaaagggctacataaattcaaggtattattgctgtacttcttttctgttaccttatgaagttgattgttgttgaagcaccaacagtatgcatacatgggtatccagaatgaccatctagtctcagttgtgcaaaattcactatgtagtctcatggattgagaggggcaattagcaagagtgtgagataatggagaacaaaaaataatgccaagctgggttaaaaaaaaaaaagtttgggaaagaaaaaacaagtgctcaagacaagcctcctatttttcagtttggcctagccctagccctattgaagaaggttagtacattcacctggccagttttagctaacttggttacctggcaagtggcggggatgcagtacattagtacttgtcctgtggtacagagcatgtgtctcagggtgtggccactccagggagagggaagacgtgctttatggggcctcctcagccatcactgtgatatgtgccaccaggaacccaggacctttcatggtccagtctgaggtgggagcaccacagaagcaagagctgcctggcccagccaagcccagattaccctaaaatcttactgcttttttcccttcagcattttaaattataggagcaagtaaaagtgtacataacgcaaggcaatctgaacaggtggctgatagctgctccatccagaggaagagccatgaagttcccccgacccacacatttcaccctgtcttgtctaccaaaaatcacatgaaaatgcagacataaccatggaggagtaacccatgaacaaagggctggtaattacagtttaatgctgttctttttacccctttggctggctggctgtgcaaaggcaggccccggtaattacggtttaatgttgttctttttacccctttggctggctggctgtgcaaaggcaggccccacaggggagtaatgtatttgtgacagccagttggggtggggagagatgggctgtactacactttgaatttattatgttctgctaatacttttactcctatgctggaaagttatgttttccttcctttgttagacaatttttgcagagtagtttaacattttcaaacatttactatatatagcacttttaaaatccaggaactgtcatttccaaagaagattccatgtctataatattaattccctgtcctctcctcattgcctttttcagacatccactgtagatagcctctgttccccaggaactaacatttccaaaggaaactcccttgcctataattccctgttatcttcttgttgcctctcctgaataataatttttgattcagtaccttttagctatttataatgttatcgtataatctgagtttgggaactgcttgccacttccagtttctgacacccaaaacacattttatgcttagagaaaacaatagcaccctgactttttagaagacatagtttttccttggggatccaaactggaagcagatatttgagctgtgaacacattttttcttagaagagtcaattaggagctgggttgaagcttcagtctatgcacttagagtcaggttttaggaccaagagcaagcactgtgggcacctgttgtaagaaaacatctgacagcacgaggtgctaaattgcttcaaaatcctccgtagctcgtggggatgctacctttttagtaggagtttgaagcccagaatgcactttatattataaccaacacagttgaaaaataggttccatgttctataagaatggattcattaaactgcatgttctggaaaaaggatgtattagagactttgaatttgaggatcctgtgttatatacatctctgagccatcttatcaggaagaaaagcagctccttaaggtgcctgcctcttcctctaatactatgtacatatttcgacctctgccctctttaagttattttcatttgtcttgtagccagtatcagacatgttaatgaccactaactttgtaaatgaaattattgcagctcataatgtcaagatgtgaacctaagcaggccttaggttttctgacttaatagccgaaccataccagtctttccctgatcattgaaccttctgtcttctgcagtcagcagaccgtctctaatgagaggtgcacagacacttttgatgcttattttaagggaagccagtggcagatggagagccatcagatgaaactgttattaatcacaccatttctgaagctgttctgactccacaccctgcattgtgacaaacgccaggatgccaagttcctagtattgcagcaggttcttagtacataacaaacactatcagtgcccccagctcaacttcgactaaatgccttccaatagagttaagctgtttttatctaatacatgctaacagtaaaaggacacagaccctcttatttgaccctcttagcatctaaggaatatgatactttttttctttatacttagctgtgtattcaaagctaacacattctctaagtaaccaagttcacactaaagaaaaattgaaggccatcctctaaagccatgctgctcagtgtaggagccaccagccacatggtcaaagccacacagagccactgaaaggtggctgctataaattgagatgtgttatgagcataaaacaagagagaaatgaagactatctgcttaataatttttatattgattatatgttgattatattttggatatgtggggttaaataaaagattaaatttcaccttttgtttttgcttgtgatgtggctactagaaaatgtaaaattacatgtgtggcttacagcgagaccccactatttacagggcactgaaagtcattcttcctcttaattcctcatctaaactctactcattgactattttgtgtatctgcatcttttcttccaaaatgaatgatcagctgctagaaggcatgactatggaaacagtgtatcttctactgtgatttttcaagagtgaggaagtttggctatcaccatgggcgtgaggagaggggttctgttctcatttggtaaacatacaccagatatgctaaacatcccatagaatatcttagacaaagaaaattacagtaagtagagaaatggatcaaagagtggctattcttggactctctactttccaggtctttttggctagagaactctttttctaactttgttgcctggctcttggcagtcaatgtccaaagtagtgcattgagctgccccccaaaaggggcacagtttgtaaggaaaccatatgccctatgggacctcatgggatgacactcagttagtacataaggatctcttggaagggagctgcctttatgtcctctaaaccaggtcatctcttatcagttaaatcctggtgctgactagtacagctatatgagcctggacaaatcacttctgagcctgtttttcctctctgtacaatgacaatgatgatagaacctttcttataatgttatgaaagattatattttctgagataattttagtaaagcaacgtagcatagagcctgatacatgttaagtacgttgtgtatattggccatgattattattggcttcttggtaatgaaagcatcaaatactaagggcagcttttagtatattatttctgatcttgtgtgatcagaaataccacatttttgagaatgtattattttccaaagaattaaatgactctcagaggggaatggataaacccacagaggttctggaaatggagcagtttcctgtaagtatcatgacttccaattaagcccctttgtctgttttatccctgtcacttgtactcactgtgtagatcatgagctaattttgcttggactctcccctcccgccatctcttagagcccagcagtgctatgcatgcatgggttaaaaatttcaaactgtccaaatgaattgcatttattggcaatttaatgctgaaactcaaagagggaaaagaggagaaaaaaaatcaaagatgaagtggaaagacaagggcccttggatgcagccggacagaggttgtaatatctgctctgccaaacactagttaagtgatcttggtgtagtcaccaaacctcttgagtctctttcccacatacaaaatgaggttgatgtgtttcacaaggctgttatcatgactcaaggaaataacctaaatgactagggcagtgacagttcacctctctctcttcatattgctctcaatttcatgatcttcttctccccgcaaccccatgatttatagaagccaaattacgttctctgatttatagctgttgtaactttggaatacatttaagaacatggaattagttgtcttttgttagatccacatacagaagtcacagaaatgttttcatcattttgaattttactgttcattctggcaaagtgaaaatgtataccaaaacactattttaaaccacctatcccctgggttagaaattataagttagtgtagcccagtgaagtataattaaatgttgccattctcccatttatttaacttccttccctccatatttgaagtaattttcgcttggtgccaactccagtcattctccagatgcctgtgatttcttccagattttcaacacacagtggctaaagataatatagaattattttttaagtaatttgtgattaaatgtaaatttagtaattttatgttgggacatgtgatctccttgacattttctccaaaacacagaatttaagcactagaaatgattttaggacatctagttaaaccattaccacttcactgttatgacagtgaggcctggagacattaaatgttttgcccaaagttaccaacatgttgttggcagaaaaatctggaacatatggcctcatctattgtctaaattttttctactagtgcacagtgccttttcaattgctttttatttgataatagtgacaatcataaataggggatttaatcaatactcttttaaaaaaaaaagtcacagaaagaaagcaattgtattgaaaacccctttctagtttttccagtaggttacattaaatggccccaaaaagtaatttatgggctaaaatgaatgtcttcagaaggctaacataaaagatgaccaacagggggaaacctgaaacagccttttaggtaatttgcttaacttctagcccttttaaaaaaattactcaagctcatgttagagccaacaaaaaacatctgttgttttatttatagccacaatttctaagaagcatattctatagcagatgaaaaagtagttgacagcttataattcataaagttactgaggcctaatctgatagaacaaaatgtacaaactccctcccgtggttcagaccctatcccttccctttctgctgaagacagaaatggtgcaacagaggagtggagcataggttattacggttgttaaggaagaggcgactctgagatgataatgcagaaaggagtaccccgcagtgataaatgattgctttcacctctgggccatccaccagcctgagtcactgctactttttcattaacattgtatggactttcattataggaagccaacattttgctgtgttcaatctacagattgttaacagcgtatttccatcaggaatctaaagtgttaattaaaacgactgattgaatagttccctctctgagggaagcttttagtttgccccttcctttcaccagttagctctagtctatattgacataactttctccctgctgactcttaagcaattattagaattcactcattactcaaatatcacctctctgtatctgttggcttatttctgagaatcctttttgagaacatgaccaggcttctttctataatttttatatatatatatatatatatacacacacgcacacacacacatacactacatatatatgtatgtagaatacatatatatatctatatatgtacatatatatctatatgtatacatatatctatatatgtatacatatagatacatagatatatagatacatatctatataatgtatacatgtatacacatgtacctacatgtatacacatgtatctgcatgtatacacatgtatacacatgtagatgcatgtatacacatgtatacacatgtatctgcatgtatacacatgtagatacatgtagatgcatgtatacatatatacatgtagatgcatgtagatacatgtatacatatatacatgtagatgcatgtagatacatgtatacatatatacatgtagatgcatgtagatacatgtatacatatatacatgtagatgcatgtagatacatgtgtacatatatacatgtagatgcatgtagatacatgtgtacatatatacatgtagatgcatgtagatacatgtatacatgtagatacatgtagatacatgtatacatgtagatacatgtagatacatgtatacatatatacatgtagatacatgtagatacatgtatacatatatacatgtagatacatgtatacatatatacatgtagatacatgtatacatatatacatgtagatacatgtatacatatatacatgtagatacatgtagatacatgtatacatatatacatgtagatacatgtagatacatgtatacatatatacatgtagatacatgtatatagatacatacatagatatatagatacatagatacatatatttatatatgtacatatatctacatatatatctatatatacatatatctacatatatatctatatatatatatctacatatatatctatatatgtagaaatatatatatattctacattttagttctgctatatctatagggccttctgtatatcacagttttgtgtgttgttgttttttttaagtgcattggtttggcacaaataactatagtactatttattatcctgagcttttttgagaatgtagtgatagggttcaacatctgcccaaattgacccatctaaaattataattctaaaaccataaccagaagaagcccattaatttctttagtagagaggtgagtagcctcttgtttatttcactactgatcatagtctattgtgagatatgaagatgtattagcccaccagaattaatcacctttgtctgaagtagtgaaagtatattgcttcattttgttaaactctgattccttacacaattgttaaggattgtgtttacttttatctcaaaattgttaccttttaatatatatagtcttatatcagtgatcttttcaaacttttaaaatgaagtctgaataaatattattttcttatgcatttcttctgcaccagctgatagggaattttctgtacaatgttttcaggcctcttgcctttcttgcctttatttttctctgcaattccacacacaggtcattgctttcccttcctctccctttttgatcatggatgcttcaactcccttcatatatttgttaagcatattttactaagatttcattttgtgatgcttgcaaatatacattacaaaatatatatttttaaaaagtgatttgaagggccctctgtccatctgatgattaactagaagagtcttttgtaccttgctaaaagtgataagttagccagctatatttagctggataaaacccattacatccttggggaagaatgtgctttgtttagctttatgagaaaatatttaataaatgctgtcttgaaaatatttagcctggctgagtgagctggcaaggcttcaatactgataaagcagaggtgatggtgaaaagctggcctgccagtccaagctcaagttaaaaaaatgcacctcttgtcactaagggttgcaactgtcgccaagtgcttgtccatcagtgtcacgtaaagattttttaacctcacatatggcatcatgcagtttgtctgcctaaaaaggcaacctagattcacagagtggttacaattggctttgaagtcccatctgttctgtaaaatcctagctttatttcttactgctggtatgactttaggtaacttgtttaatttttcttaatctcagttttctcatctgtaaaatggggacagtgataatttcttagagcgttgtacagattaaatgagattaaacgctgagcagagtttcttacactaagtgttcactacatgggaattaatcagcagtagtagtgatttgtaatcagcctaacattttctgtccctccctaactcctcccaccccacaggagatacaaagagcaaagtcctcttgaatgtggcgaggtaggaaaggctctggcatgggcatcaggaggcctgggtcctcggcttgaacttcctgtgggaccttgggcaagttgtggctcacataatccctccccactcatcagtacacagtgcacagggcagcagagctcctggctgctagtctctcttttgatacctaattcgttgtggtatcagaccaaatttgatatgatagctagaccctccggtccgtcagtatcatttggggtctggtgtaagatcagcctgtgaaactcaggcatgtaggcaacaagttatcagtaagaaggtcaatcattgggattctgtctcccacaatggtctggattttctctctgtggctggtgggctcagccccaatccttgctactcaaagtgtgattgtggtccgaggaccggcagcatgggcatcacctgggagcctgttggaaatgcagaatcccagactgcaccccgacctcctgaatcaggctgttaatatgtacattaaagttggggaaccactgcctcaaacttactgcccttgggaatattctgacacgcagagggtatttatttactaaatacttacagaatttgtgtttgacattgacattttctagacaaggttccattcctctctttgggtgtagtgtactgatgtgttaggtcagggttaccatcagactggtgtttatgtctgtaccaccatagacatttagaaatctatttctcacagggtgccagtgtggttgggttctggtgagggccttctccctagcctccaggctgccaccttgtcactgtgatctcacatgggaagggtggggagaaaggtctctggtgctgcttcttataaaggcactaatcccatcgtgagagcacttgccctcatgacttcctgtaaactcagctgcctcccaaaggcccatctccaaatattatcacattgagggtcagggcgtcaacatgaatctggggggaagggacacaattcagtctgtagcaactgacttccacatctgactttaaaatgcatctttaaaaaaaatgtgctggcagataaatatgtaaataaagcaaatatgaaaatgttaatcgtagaatctaggtgaaagataatgtgggcgttcactaaacaattctttcaacttttcaggatatttaaaaatgtcagagaaaaaaccccctactctctatagttatttaaaaggaatctggtgctgcttttttctccttatttccatccaggctttcttaagagtgcttgttcggtctggctggacaaacttgcctttttggcagtttctctctctctacccactcactttctccttggtcagccagtggcctgcttctgcactgtcagtgaggtcccagcctggatccaaagcttctttctggtctctagtctgccagtagcatctttctgtccagttcctctccatccccctgccctctcctaatactaatcaggggatccttcaattgcttgtgacatcgcagcttctcaagttacattttacaactctgctttattatttttaagcatttctaacatgacattttataagtttgactctgaaatttatcatcacatgtaagtaggaaagaagtgtctccacaagtttgccctcagccagagatagtgtggttcatctggaatgcccctgcctttctctggttattaataggggctcctattgcttttccatttacagtgttaattatctgcatttcaaagtagttcataatgagagggaatatattaacttgttatttggggaggaagtacaaaaactgctattatcaagatcatttaacttgagcataatcagaaagtattaaggttattcccttgtgggattgaccatcagatatctgtgtgtttcataacacccttattacagataccttttaaagaagcgaggcttgcaggaagtgttgggaaacttactataagcttctttccttgactggcacttgtatactctggcgcagggaagacaagcccaaactaaatacataggcattacttaagagctttgtgacattggacaaatagtttccttgcctttaaactggggataatagagactatacacctttgaactgctatgaaaaataaatgaaaatatttctgtaaaatacttactgtgggaatgtggctcctagttgatgttcagtactaatcattcattcagcaaacagcctaccgcccactgtgtgtcatggcctgtgatttgtcttttttctttttgggggcttctgggtcatacttcgtatgaaatctttcttagcacaccgaaagaccaactttccttataaatcattggcttcaaaaatcctgtggactcaggtataaattatttttctggtgaggagaggaggaagtccctttcttccccatttacatcctgcctagctattttaatttgctgtacaccgtaaattgtaatcttagaatcaaactccaatttaggtgataaggatcacaattaattaggctagcctgtcaaagattaaatgtaatcttgcatttcagttacctcctaactctgaggctttagctaagcccgtcagaaacaaagctgttaggtctgcttaggtttaataagatctttgcctgctgtttgttttctataccagtctgttgtctagaaataaaacgaatggacagaggatctcaattccctttcatttgtttttagctgtgcagcaggagagataaatgagagaagataaacttaacgatattaaagactaattaggatatctgaggagatttgcaaacttctagtttaaatctgtcggcaactcttttaattccctcctgctagttatctctgaaaataatgtagttatggctgaagatttatttccacatctactctttgtactctcattttcagttgcgcatactttttttctccttcttcctccaaaaaaaaaagctcttgtttcggccacactcaatataatttagcacacagtcattccaacttcattttgtcttcacattcagaaaactgaagtctaatatctcaaatatattagtattgtggtccttttggggaaagtatgataaattgaaaatattttggttttgacttctgaagattttgagtattgtttatatatacaaaggcaaaatgcaaatatatacaaggcaaaatgcaaatgtgcttccagcttgcttccttagaaaagtattgagaacagtctaagtatgataatttctggtcttaaaacctgcaattgcaatcgggtatttccataatctaaacaataataaagattacatgactaattctaacaataataactacctattagtttgtgctttctacatactgggcacgatgcctgtcatgtttatatatatatattatttaatccttattactgcacataattactcccattttacagatgaataaatgggattcaagttaactaacttgcccaagactactgaattcagtaagtggcaaagcaaggattaaaacctaagcctctttggctttaaagctctgcttctaatcacttttttactactgattaaacagatgtgtcccaaaattaaggaagtcatcgttgttttttttgctttgtttttgcttagtcaaagagcacaggccatcatttgttgtagtgtcacccgtaaagcttaataagtttaaagttcagggtgttaatcattacaagcataaagtatgaatatgctttaaaggtttatttaagaaaagaattgggattagatttgcccaccagaatatacatttttcacttgaagtcctgagagagattcagacagaaacagctttgactcagcagcagttagcagacaaacatcttgatataatactgatccacactttgcatatacactttcttttctttgtattacatttttagaggtaagtggcagtttttcacacacttccaaactgcttccatcagtaatgaaatatttggcttgggcagcctctggagtcccagtgtttcagcttaaactttccagtgggccctgccaggcactaacttcaaaatatctttttttatggtgaatgcctccagaaggtgcaactgtgtggtggtttcattttgcacttcataacggtgttggcatcacttaatgcaaagaatgccactgtctcccacacaccgctggtgcccaaggactgtcgaggcctgtccatgttagtggtttgggaagggctgaagtttggagagaaggctctttttctattccatgtgattggctgtcaccagggcaaagggggaaaactagaacgagtggaaaatgcagcatcggatgtgtcatcaaatattcttcctacaacctgggacacctagttcattggtgttctggtcaacattgaaggctgaatcctcctttcttttgaaataatgcgtgtcttggattcactacttttaaacctttctgctgatctttatccttttcttcctaagcaatactgatttctttcaatgaaaaatgatttagctagtgaaaaactgggattgggttgtagtaaaggaatcaacaaatttgcccagattcttaagagtggagttggttctccacacttatacactgtgctacagcaagcttcacaaccaaaacccattacttattcaggtataaaaatcaaaagctgaactgtaatgagaatttaaatgtaaactgttggaggatggtgctctgttaatttgtgtttgctccataccccaccctatataattgataatatttgcatctttttgtttttagtactattattttttggtttatcaaactttgtaacatggtgctttattgtggacttttcaaagaacaccttgccaaatttggtaattcctagcaattgtcatttcctgttggaatttcttaaagtggaatctaatggaaaagtaattcttgaccttgtgtatttagtaaaattaaaggcatagttgattttaggattgtcataaaaattaatattttgttttaaaagactttttagactttcaatgctaattgatcctattgttggaagtagatgatataaactttaaagctttttgggtagaactttcacattcaccatgtctaaatattttaaagaggaaatggattgactcgcagacattttgtactaaggaatagaaaatctttgaattgctatttaaaaaaaaaaaatccctgtaaaatttaccattttaaactccagttgcaaaatcctgatcagctatgatgattcatacatttgagcgataaagcttttttcaatattacaaattcagtggggagtcactcaatacattacaaaaagagtacttacacttcctagtacccatgtgtatttttttttctttttaaagcaatctggtgtgccttttgagaaaagttccagtgttctcacagatcctgacttggtgtagcacagtgcttttcagaaacttggtccaacacctgaatgagtaatgtgtaaaacatataatgttttgtagctcaggatactgcaggtaaactaacactttttgccgaaaaaacattgaaaagacaaaggaaagcaaggaagttttgcttttttaaaaaattttttcaagcttaatgaagaaagagctggaaatccttttgtatggagcatttgccagcccagcaatataacaacttttgggtgcatatttcaatcacaattagatgaaatctttaattatcatttaatttgactttcatatttgcctgcagaaatgattgtgttgataagactctggaatgagacaaacctttattaagtaattccattttcagagccaacattaaagttttttttaattaaaaaaatgcctgtgtaatttatgagaaaaggggaagaggaattggcatgttggttgcatgagagttgcatggatatgtatttactatttaatctttagctttttgagatttggggtgtgctaagtcttgttagtttgaggggcctaaggagtgacacaataatggatcttaataaataacacttttctacatcatttctctacctttatatttcccttctattatatatgctgacaggatgatatttcattgtattcagtgtagaaggtgtttgtgagagaggatacttttgtgagttgatattaaggcaaagggaagtggtttataatttatcagaggaaatgaaatggtgtgctctttcattttataatatttcttttaaaattttataatgcttttaattggactgtgaaacctttaagacatttgtatttgaagtgcttttcagatatatttacattttaacatacagggatttgagagatgtcattgctggattttttcataggatcacccacatgaattttcttatcaaaagagtatgtcctaaagcttatttctaaccccaaacaggttactagcccattcctggatgttccgattctgaagatttagggtggtacctgggaatcagtatttctagcacgtcctccaggtggtgcttagctctggcaagtgtgggagagaccagagagaggtgaagttcccacccagccctctgcacagtgactggaaagttaatggccagtcgtttgtgcttctatgaaacctaagatgtgttacagtgatgttgcagtaggacaaagtcactcaggaaatcgagtggtaaacattgcagggctttgagttcaaatattgattagctctatgttaagatgccttgtcttcagggatagctttagagtgggatctctaacacaaagctgactcgggaatctttcatctgccattgacaaaatttgcccttgtgcaggcaagtaagactatactctctaattttatgggcactagccacctatggttgtttccatttaaatcagttaaaataaaaaattcagttcttcactgggaatggctgcattttactcaataaccgctgtggctagtcattgctttatcagagagcacagctgtagaacatttccatcatcacagaaagctctaatagtgctactgtaggattttccctcataatatagctcttctctttttatcctgggtagttgcaatggctaatagaattaggtggaaagatcatgcatccatctatgtactgcacattgcatactgaaatctgaaagaatgtttttgcaaaatgacttaatcatacttctctgagatcaaaatttaataacattactttcataacgtgaatttgttctatgttgacttttagtacttgaaatacaggcttaattaaaaatttgttggccaggtgcagtggctcacacctgtaatcccagcattttgagagattgaggtgggtggattgcttgagtccatgagttcgagaccagcctgggcaatatggcaaaaccccgtctctactaaaaatatacaaaaaattagctgggagtgatgctgtgcactgtagtcgcagctactcaggaggctggggggggaggatcacatgaactcaggaagttgaggctgcagcgagccatgatcacgccactacactccagcctgggtgacagagcgagaccctgtctcaaaaaaaaaaaaaaaaaagaaaaaggaaatttgtttaccatagtatatggcttctaataaagagctatactggtaaaatctcacagaaacaaaattgcaaatatttagtctttctcagattatataaattattcctagaaaagactgcaagcaatgaggctaataaacaggttgtacttatattttcataatgactttaatttacctttattttgcagtttcacaaatttaagatgaatatatttagctccctcttctggcataatttgagaatttttttgcttacaatggtcttatttattttttttggactgagaataaggttatcaatgtaatgttgaagaatgttatttatgagtgtcatccagttagattttttggtatcattgtaaatggttaaaacgcatgcaaaaagtttacgaaaacaccacattttaaaaactactaattgaccaaaaaatacataaacaaaggctttgacaaagttatacagaaatttattttgatatcaagtgggcagtgatcattcatattggcttctggatctgagactcagcccatacctggcatttgtgaggcttggggcaagaatgcaaaaagaggcccaagtaccctgtgcctaagtatttttgttataaatcatgtcaactgttcaataaaatctgtcccatcctttctaggcagttatttcttcctaatgaccaggaggagagatctgaattcaggttcttgggctcctgagagttctgccctagagtgtggtattatggggagagctggatcctggttcatccctggcttctccctgcacatccaaactcccatccatcctgccactccccccacctttggggcccaggggtgtacctagacaggggggtttgtcctggggagggtggacctgggggaaaggccataagaggccatttagcaggaaatcctggagcattactctgagtagaccctaggtgagaagcagtgggcatatcactttggcctggaaagtgcaaaagcccagagcaggggttcttcttgctcgggcctgatgtaattaaattattttgtacgtccttcattgtggtctaatgcattcaactatccaaattaaatacaatggtgggattttgttgtttgcagctttgactctcccggatcttgcagagcagtttgcccctcctgacattgccccgcctcttcttatcaagctcgtggaagccattgaaaagaaaggtaaccagactgctagagggcatcagttcctttgttctacccttatttcatggctcttattatttgtctcttgtgcattcattaagtaaatttcctactaccagctatgtccagatactctgctggacactcaaactgtttggggctaagtactgggaaaaatgtctcggtctataatttctaactctagattatcatgtagtttccatatggaaactattaaattcttcataatttaataaatatgattaactttcttcttagaggccagatggttttgccaaaattatcaacatgccaggtaagattaatagtaggagttgacttccaagaatatttggtacacatctagaacagatactggatggaaactggaatgtctctggcagcagcctcacaggttctccagagagctgtgttttgcatacatggtctgtggtctgttttgtgtcctaggtctggaatgttcaactctatacagaacacagagctccagcaacctggcagaattacgacagcttcttgattgtggtgagtgtcacagagctagaaatgcaaatgggaaagacaggtcttggctttctgtttcaggtaatgcacacacacaaaattgaatttaatctatgcagtgttctaaatttaaagggaactcaaatcatgtacagttctccctgccctgttatggtaacagtgcaaacctttgaaatttttctcctgagttgggctgcaagtgtgtgcacgcctccctgcaggcatgttggtcatcatcatagccatcaggccctgggtcctgcagaggagagaaaccacctcttggtgtttctctcgctctgtgtatctaccatctttccttgaccctgaatttggctacatctaattcatctgaatcaattaaaaaatatttttaagcctatgtcacttaagaaatgtctcttctgacatcctttttcttttattacctttcccttccattttccttttccgtttccctttctttctggcttgccttctttctttttttgtgttgagtgcattaagtaacatcacgatattgttatgttcagtggtgtgctgataaaccaactctctaggaagaaaaaggccctggtttgtagcatctgcccatttttgtggcatgaatattcccaccggggcttatttcaagctaaccaacatgatgtcactggatgtggaattgggaagaattgaggacagtttgttaaataacactaattaatttagccaagagggctttagtaccccaaacacccactccctcctttggcatagatgaaaaactacaaatcaatttacttgccagcattccagcaagtcatcttcttataaatctttcaagatccttcattccctcataacgcttaaaaaaattatatactgcctcacatcattttaactgaaattaggtgtttaagccaaaaagagtgaaactcagttttggactccgtcagaggtataattgtacaaagaatgcccacatgacagtaaatgagaatttgaagcatgaggcagtttcaaaatgaggcaacttctgagacttttagaaaagaggtttttttggagaaaaggaggagactagacctttatcagtatcagtaaattcttacacttgaaatgttctgaccagatgtttcaaaagttaaaaaaatgtttaactccatttttcctttgtacatggaaatcagttgcatgcgaacagagcatatcctctttgctgctctgcctcctgcacttcccacagagcaggtcattagaagttaacatgcagaacactcaaggtgaaaaggcttgtttttcggtgtttctgacagctttatcagggctttaaggaaacgctgaattttgtccttagccaattgaaatgaagacacatgtttgggtcagaaaattggtcaaattatgaacacgtttagtcacaggaagagtttagacatcagagcccgatgaagtggaagttatttgagaaatagtggttaggtttataatgtgatcaacacaaaatgatgcagtttagttatttaaaaaaaaaaaaaaactcttcacaccactcgtgagatagagtcaacaaccaagattcacgtcaatggtacattttgaccaacaggtttccttccccagtgagatcaaaacacatagaaaactggtttcatttggagtctgtgctaaaaaaaagtgaaatttgtgccccaccccaaaaaatataaataaataaatgatgtccaaacttgggagtggatctgccagatctgtttccaactcaaagatttttcaatacataaaaacattgtataatatcctggaggaagctccaaaatagtcacttacacctaaaaaaaaaaattatggcttttaactaaccttgtgaattaccagtctttgaaaaggacagacatggcagacaatagcccacttttattagcacctgttatgctagttcatccatacattaactttgtgatgtatgtcctagtaactttaactcaccagaaaagaaagctgaccctcaggtaaataatttctttcacatttttcagtgccttagtggctaatttttctgactccaaaagtccttgatttttttctcttttttaattttgccctaaaatgaattgtttctttgtctcgtgcaagttttaatgattcagattttcacctgacagtttttggtttcatttaacctaattcaggctttcttagccttggtactattgacattttaggctggataattctttgctggaagagtgggagcttgtcccgtgcattgtgggaagcttagccacatccctaacctctacccatgaggtgccagcagcattctcccccagttgtgacaatcagaaatgtctccagacattgccagatggctcatggcagagggcaggatcccactcccactgggaaccactaacctagggagagacctaaggaagaggagactccattccagggggagggagggaggagtgaagggttggagagtttactgggtacctgtcatgagtagactcagtgaaaagtgaggtaggagagaatgcaaacacctccaacccagacctaaagattatgtagctcttcaaaagtcatcgcatgacaggtaggaatagctaatggaagagcacgttaggccagtttcaatgcagaaaaggattcttagagagcagaagtcagataaatagaacagactttgtcactagctctagtagaatttgacataaggtaaggttacccaaagacctgcataggataattttattcatatactatgaaagttcttttgatatacctcatgtgttggaaaagggctttgatgaattaacttcacttgtggattgagccttctagttcaatccacaaacatttaacacgttgtatgtgctggacactgagggatgccagaagagcaggtgacagccacagtccctgcccttgacgtacctcggtctagtagggaaacacataatcccacactatgattatactccttgggaagtgtcttgttagaggggtggctcattagcactgcagaagcacagagggaaaccctgcctgagggagggatgtgtgcatatttattatcttaacgtttatactgcatcaccaaatgttttatcacatattttaggataagcaaattcggtaatattaattttccgggcagagagacattagatgaaacatgcggggcaaagtgtatgggaaaccagaagcacggccaagagtggtgaccatagagaattcctatagcagcacacacacaattttatttgacagtatttaattatgctcacaattgcattaccttcaacgtagatcctttatgcagaggatctactacagtggtattgcccctcccacacttgttaaacatgtgatatgtctctggttggttgtttgtaggacatttaagtgatttaacacttcgcctcttcaccttttaaatttaataattcttttcctcaagttgacctatccatatcctattccagacctacttttcttagagctgtgtggttgtgtgactcactttcggaacgtcggcctacctagtggggcaagtttggtttatgatgatatgtccaaggaatttttgtagtcttaggctcaacctagaatgatttgtactgtcatatttcattcaaggttatctaggatactaccttctcccactcatttatactcaaacactttgcagtaaactttcatacttcctcattctctcctaggccacagcccaatgcagtcaatcaccgagttatatgaggtctcgataatattttgtacatttctaactgcattagaattcagacccccatcaccttgattcagagaactaaatctggtagttttacttctagcagcactcccttccaatttattcttaacactgtcattagtaaagctgttacaaacgtagtatcttgcccatcagcccacctttgctccactgagtacacaagtccccagattactttcctcaagttatccttcgcattgctagtgtacatccttcagcagcagccaaagtcctctccttttctagaggcccatggtcacccctgcccccagatctttgtttctagcatccctttcttctgctgggcattgtgtctttttccaacccaagtacttagagtgccatgcgtagtgagtgcctggagggtggtattgattagttttacccccattattggatcgcttgacctgtttcccagctgagggatttactggacaggtatgctcatcttattttctgagattgtctgatatccacaggttagattagtaatactcagacagaattagggagaaacattctaaaaatgttcaaattattttcatggatattcttgagattggttgctaaaagtctgtagtatcttactgttgaatccatcactctgttggtgacatttacatgaattctgagacatatcaactcaagtcttaggaaatctgggaatatgcatttttaaatttttcctgttgaggttttaggaaacatttactatatgactaaccattcctagttagaacccttttcagtcagggcagaaccaccctcagaggatgttaggaaatgtttgggttctgtattcgtttgctcaggcagttataacaagttaccacagactgcgtggcttaaaacgcagaaacttggccaggcacagtggctcacacctgtaatcccagcactttgggaggctgaggcgggtggatcacgaggtcaggagtttgagaccagcctgaccaacatgatgaaaccctgtctctactaaaaatacaaaaattagccaggcgtggtggtacacacctgtaatcccacctactcaggaggctgaggcaggagaatcgcttgaacccgggaggtgaaggttgcagtgagccgagatcacaccagagatgcactccagccttggcaacagagtgagactccatctcaaaaagcagaaacttacttctcgtggttctggaggctagaagtccgagaaaaaagcatgtttggtttcccctgaggcttctgtccttggcttgtagatggtcacctgctcactgcatcctcacagcgtttctcctctgtgcctgtgcatccctagtgtgtctctctctgtgtcctcatttcccctcctagaaggatatcagttacattggattagagtccactctaatggcctcattttaacttacatgcagtcactttctgaggcattaggagtttgggcttagaggggtgggacagaggatggggtaggtaaccactgaagatgcagcccaattcagcccataacaaaggcattattttttgttgccccaaagtgtggaggtctgctactggcatcatgggcagggggtcaggcatcctaagtgcttgcaatatgtcagagagacctccacaggaaaaattgttctaccccaaatgcccggagcaacccctacaagaagtacggctaacgaatactttgtgtcttgtatttatcctcatattgcttccttatttttttttttttttgtcacatgtgagtcaaattgttcagaaaattagcccaactgatgtattctataaaataaatgtctgaaatatttcttaaattgtttcctagatacaccctccgtggacttggaaatgatcgatgtgcacgttttggctgacgctttcaaacgctatctcctggacttaccaaatcctgtcattccagcagccgtttacagtgaaatgatttctttagctccaggtttgttttttctcttctgggaacctcattgaacatacatggagatgtagaggtgcttgtatatgtcttgcatatatagaaatagtggttagaaaatagtagtaataacctgtccctcccccaacaataccacctcaaatttcctcctccacccaagcatccaagagaagacccagattctcatttgcttgggaagcccgtctgcatgtcagaatcagaaatggctcattgttaacctattggtcttaacaaagtttgtacgtcaatgaaggacacggtcttccaagtactagtgtcagattcaaggaactgggactagaatccagtgatgggggatgttcttgtcatctttcctgagtggccataacagaatgtgttgagggaagatggctctcagttttaggagataaggttcagttaagtgctttggggacaggaaactggttcgtaaccttcaaagttaaaacctgtgatacttatctgatgctcctctgagttagccaatcacacttgaagctgctcaatactgggtaagttgctgccagcacaccctgaacagcttgtggtttctttacacactgagctttttgcatttccatttgacctgagatttctactttctcataatgcgttttctaatgagaaggacaaatgtactgtgtgcttctcccaacaactttttaaatgactcctatagcttgaagaaagagcagaacttttctaggtgtttattcactgatacctggaagtagtcgcttactcatttctctttttttttttttttaaacttgtagaagtacaaagctccgaagaatatattcagctattgaagaagcttattaggtcgcctagcatacctcatcagtattggcttacgcttcagtatttgttaaaacatttcttcaagctctctcaaacctccagcaaaaatctgttgaatgcaagagtactctctgaaattttcagccctatgcttttcagattctcagcagccaggtaagtgaaaggagacaaacatgtattttggggtgatgagggtagtcctaaatggattggtcatgaaaatgtattctgaatatactactccagagatgcatgtgcagatgctatcacacacattcacttgagtgtatataaatgaaaatgagtttgcttttagggaaaaggtttctaataaactctctttcttacagctctgataatactgaaaacctcataaaagttatagaaattttaatctcaactgaatggaatgaacgacagcctgcaccaggtaatgctttttgagcatttaacattctctcattgttcattttttagagccttaaaaaatgatggctataaacctcctttgaagtaacacagcttcttatggaattacagttggtagtaatatgttaccttgtgatttaaagaaaaaatagctgagtggtagtgtatatgttaattattatccgagtttcaacatttgtggattttaaattatcttggttttaggtgagagtttggagagttccctgtacccttcaacatttatgcttcaggttgttgaagagatttatggagttcattttagttgttgacatttttgtttttctttctaatacttacaaagtaggggatttataattactatataatttaaagtattttagaatgtgttttttggaagtgggtatgctgagaaatgcctgtcaaaataaacattttcaataatgcaagcagtatgaaaccagtgttccctgcagcaagttcgagcaagccagacacttctttgaaagcaggctgctgttcagttagccatttaacaaagcaggaaatgtagaccatgttagcaatgcatttaatttaaactgatgtatttttcttctaccgtggaaagtctaaacaacctcattttgctatataccagttaaaagttagctaatcgacactggtcatttagaatagtaattagggtactatacgtgtgaagtttcaggaccagtaaaaggtgttgcttgtagtcttaatttatgcctggaacttaaaatgaaactccatgaatatatttattataggtaatatatgcagattaccatatttatctctgtatgagcaggcatggggactcagtttcatcttcatgcaatggagagttaagttgtgctttttcttaattgggtattgcacagccaggcttggttacttgcatctggatggggcagcctaagagaggccagggcctagactcaaaacccacctgcagcaggtaggatagaggatagggtaggtaaacactgaagatgcgggtattgggaaaggtttatgtggacaggcccaaaatgtaccaaaggtgagagagaggtatccggtatagtagataaggcaagcatgggatgttctaaatcacagcaagcagaatgttttaacaggggtgcccagaattctaggtaaactacgtcaaagaagactgtcaacaggtagggactaggacttcagtccaggggttggccaaaaggcttcatctcgtgtgagtacacaggtcactgtgaatggatttgggagctctgtgctggtgttcagaggctgcctttggacttagtggaaaagaattggggtaggggtgtggcacatggcacttaagttgaggtttatgttagagactaggtagagctggaccctgctctcagtgaagggctagtgggtagtcctgatcttttcagcggccactcctctagagagaggagacacatggaagccaaagccagacagggtttgacagatacccacaaatgaatttatcacatggaattttggagaatttctactacacaaggtatagcagaatcagtggtagagtttgattagcctgactggtgtaaactagttaaacgcctttgttagtttcatcctaattccaccaaagtaaaaacgggtatctgcactattttcataatgccacccggaaagctgtttgatatgtcaaaggaccctacatttctctgctgagcaattggtgcgcctgtttcaaaggaggattagttccatcagctctgctaaaggatgacaaagccttgaacatttgctagatcatcccagtatttatgtggcctcttaaaaaaaattaaatccaagtcggttttaaactctagtttgagccgttttcccaggaagtttgtgtgatttgtataggacctttgggattaaatggctgttttagtatctctcatgtgtgcatacattgtactgcccactccaggaacaaaacgtccccatccagaacatcttcgtattcaggaatggctccagtgcaaatgactgctatggcagcctgggttgaagaaatgattcttaggcctggtttaaaaaatgcaataatttcttagagtccttcagcattgccacagcatgtgctagtaccagacagaactttgaaagcacagcaccttacatctccagcgaatggccatttacagtaacattgttgtgaacacaaatgagtacctgaatgatgtttaagggagacaaaagcaagactctgttatagggcagatagacagcatttctaattattaccagatagaacttgaaatgacaaagcttatgatgtttgaggcaaagtatcagttcaaataagagccattagcacatagtatctaattaaatgctaggtgggagtgcacatactctaagtacaaaaagaactttagaaatgcagctggtgactttctagggtaatggagtagacagaaaaggctcatagaagaaatagggcttgaaatgtgccttgaagaataggtacaatttgaataggcaaaggagaaatagcattttgatgcatggagtttaaagacttattcaaaataaattacacagtacaaaataatggcttggtattttacaaaagcagtacatattttaagtgatagtatcacaaaaaacatcattttagagttgaaagcattgtccagctttaccaatttggacatgaggaaaccgaggcccacagatagaggttcgctctgtgctacccggccagtatgggcccaaaccgggtctgcccaggagccgcctcctacactccagcccattctatctgccatgccctgctgcctggatttttggaaacttcgtgagcaatgaggctgcttttagtgtccaatcaaaaactcctctgaagtttccagcatgtaataaactaaaaatatgtgaaattagcccccatgggtcacatatagtaaacaaagtcagggcaatgtttatacttttcaggataaggctccaaatcactccatgagctgtgcagtggaaaaaaaagtgggcttctgactcaaatagatctggattggaatctcaactctctcgagtaactcagcttttccaaattgttttccagactgtggaattgggttaatgcctctctcctggggttggtatgagatttaatgaactgataatttctctgctatctatcgcatcaactctagcttttgaggccttatgggagctgtcctcattcagcaggtctgattccttcagtccacccattcctcattagttgtgtgaatcctgtcaggcctttttccttactgacgccatgttcccagccagcagagctacggcctctaggagcctgtaggggctaaaagggacacttgggaagttgccaccctgatgtgggtacattgcttggagggagaaaggtgcctttgtatgaatatgtggcttggtgaatggagcagcctagatttcatcaccactcctccatcttgcctaggtgcctttgcacagtgcacaaaatatgcaaccatacgtcgctgccccaagcagtgccatccactttatctgcactcaagtaggtccttcccgttttatatgcaagttaagtcgacccattcagtatgtttatgcctttaagcttcctgtcaccttatgtttaactgtctatagtttttcctattcatctgcttaattacatttctaaagggtaggggtaaaggctttttctccttttgagctcttcctagcagagaactaggtacagcataataattatctaaatttttctttgataaacttccaactttcaaagaatagtaatacatcaacacatctaatacatccagcaatcctgggaaataaggattctcctcatttacagagggaagctaagatttggaaaaggtagggcacagagtaagctctctagactttgttgatagtttgctgttctattttgttactaaaaagtcttaacttgtcgtttggctttcaatatttttttcttgaatcattgtgttatctttacccaattaatgcttaggcaggtaaagtagatttctgtaggcaaaccaaggtaaaaataagtctatttaacacagggtgcctttgaatgaaacccattataagtgtatttacatatttcagatttcatggatatattcagaaatattaatgtaatataattgaagtctaatattgcaccctcaagcccagagtggaaaataaatgactctttctaccccttgcccttctacacctgtcaaagttaatttttaaccactggcacattgcaaaacattcatcctgaagagcctgattcataaatcttgttttaaatgctctgggcttggttctcaacccagactaaaggcaagcactaaggtagagggaaatgacattcaaagagttttacttgtctctgatttaatttttattggtttaaaatgtggtctgacattagagggttgcttcaaaggtgaaaaatgaaactttgaaaaattacatgtttgtagatgcgtagaactaaacgggcaagccacactaggttttgtcaaacaatagttttatttgtgtcctgagagacacaggtattttggtatgtatgtgtttaggaggggtatatagtcagttttacttttgttttcacagtgcagatgtctctttgtctcaagggacaaagatctgagggagaattgcaggggggactactttattctgctaagcagtggggatgcctttatcagaaacctggtagaatgtgtcagagtttatacatacgtaaacctgggcttatttatatacttaaatggatgttttccttagcataatgtcagttaagaccagtggatatggagcaaataatttgaattaccctaaaaggccctctgttctaagttgtcttaagttaaaattatgaagagaggtattcattttacccttagatgaagattttggttaatttttgttgtctattctttttttcatggtctttgttcataaatgatgtccagaaaaagaagaagttttctaggttgaaagctgcttgtgcaacatttgccacttgatggtgacttgtacatatgaaatatagtattcagtttgtaacttttgaacagtttaaggatcaagagacattttcctaactatatctgctgagaagtgaaacaatgggctgtatttgcctctgaaatgagttttacgaaactttgaggaaagggagaatgatacatattgttttaaagaatccagaaggtaaagttagttttccagtgtgtctaggcctttgaggtcccagagaaatgctgacattaaaataaaagttttcctacaacactagcagcttcgtgaaaactgtacttttgatttactaattagtgagtcatatagatcaagtgacagtaatacaattatgtacattagttggtgtcaaatttggacatacgaaatatacagaaagttgatggttttctcccaaagcaggaattactgattcagttctaccagcagagggctcccttttttaagctaataaagaacatgtgtcttgcagatcactttttaaacactaaaattcaacgggaaaaagattcagctcacactttcctaatataataggacctctttggtagatgattgtacatattgtgagaaatttgtttaaggcaaagtttttccaatctatttcaagactttctatacgttgagagagtactgctttccagtggcttattttcttctgaaacagaaaatatactggtggacttaacagagcattttaatcttagaaggttttgacatgaaacatcatgtgaatccagacaggtatgcttaggagactgatgtttccaatgtttctagctttagaaaggctatttttaaaagtagggcaagattatgcagctcaggatgcaagggtattctctgaactaaccatatgtccctatgatcagatggcagattcacttatagactgttatttccattgggaaagtttttcaatattatatcagttgcactaaaggaaagtttgtaaaatcactttcattgtgggtttaacagcactttccagatatttcaagtaaccctgaagctagttgctgctgttggcctgtgtggactttatgtgaccactggatcactttcccatgcagagtatgagggtattattgaaagaacctatgtcttcaaagggaatgaaatgttttgttttaatttaagcaagctaaaaatagaaaacagaaaaaaccagagttttgttaggggtgtgaaattttttgcatgtggcttaaaagattaacttcagttttgtccatttttttttacgttctctagcaaagggaagtgaggagcagggacaatgggtagagaagggcatttgaaaccatcagaagattgggttctagtcttagggctataatcttctgtaaaccacttcacctccctgggtcagatttcgttttcccctctatggcatgcaggaattgattgaagtgaactctaaattactttctggtgtaaagtttggtgatttccctggataaccttaaagctatctatgctcatgcaactgaaaattttcttagatcaaattttaattaaatagtagtcagtaatcccaagtctggtccattgccactttctcaaataaagggcaaacatccgcttagaaaggtatgcccttctctgcccttctatcctttaccccattagctggcacataaacctaatgcagagacaccttttaattagcaggtcatatggccatttaaatgcgagttgcaatcgacctcataaaaatagccgcagtgttgttttattctgaatcgtcacatgatcatggagtatagtatgcatatggtgtggggtttaatattcgtccgaggatgccctcctactacttactattgaacatttttgtaatctcctccctgcccgagttgctcacaagggctttcctgttacacctgcagggctgtctgtgctggtgtgtgggaggaggtgcaagaggtggacacgagcgaggcgctgtgttctgggttgttccaagaggttcaggcctttacaagtgaggctttgattctattttttgctgaactagctcagccacttcctgtgtttggctgtgcatagtgcctcgcttcactgtcggctacttgagccccgcgagccagccagcgcgctcagcagccagtgagactattttaggtcccctcacaatggccttctcatttcccaggcgaaaatgagcaagttggtcttgcattggccacttgtcagccgatgacaactttgacttgggctcccctccccctcccgaaatccctagctcagcaaatatttgaacctgcccaagttaatcatgaagctgcgatctttatctaagggagacgtgcgagcgcctgggctcctttcctccccgatacagtagcgaaatccagttggcttctcaatgaggagccggcagtgagcggcggtggcccggacgcactgccgggcggggcgtggggcggagggacgagccgagccgagccaagcggagctgggccactgtgcacgcccggagggtcctggcggcgcccccgctcctgcgcgcactctcggcgccggacacgagcactgcctgccgggaacaggctggggggaggtgcgggggcttggcccacttggtggaagaacagctttggggattttttttttttcattgtcggatacaggcatttcaaagggaaaccgttgaaatgcataacctgcaaagtaagttgccttgaatttgtgcacttctctgttccttatctgagcggtgcctttctgtagtttgtcttggagtacgtgtgtgtgcgtgcgcccctgtaagcgctgcctggggaggacagatgggagattaggggagacactccccctgtcctcgagggggacagtggctgggaaagatagggtttaggttggaatttcagtaagaaggtactaattacaacgtgcttggttggaagttggtgccaggccagggcttggagagaccatgggaaaatcacctgtctccctgccttctccctgagttagtttgccacagaagatccaacagccagactggtttgcaccgacggttcccaaatgcatggactggcactctgggctgttacacccgccacagctgctcggagaacttgtctccttgcttcgggggagggtcgacattttaattaaactaaaaaagaatgtttttctgaatcttagggcatacagccacttttaccatttttatttgaatttgagttcaggtaaacttaggcaaatagaaaagtgggagagggtgggaagagacaaggtgagcctgcttttcccaatactgggaaaatgaattaaactagacgggggacgtcagagaacagaatgccttgcctttggtctgctttttaatatattttatgatcccaaattttacagaaagtctcaagggtttctgtgttttttaaatggtcaaatatgtgacatacatgtgtacatagatcacagagccccactgtagttttttaaatgagccacatttaccttggggaagagcccctccccccccgccatcataatattgtgaatgtaaagagagattggttcacaatgagaatgtacagtaggctcctataagggtgacaggattatatgcagaatgactttgaagagccaaaattgatttatttatgttaagtagtgctaagaaggaatatttgtcccggagtgaggcatttgagatagagggggaaaagcaaaaaaaaaaaaaaaaaaaaaaaaaaagtgattacatcatcttcccgttcaagcagtattagtagcgaagatgggttcatcagtgaaatattttgcaaagataaatatacctccactctgcattctgatctatagcctctttctttttggaagaagcattttctttgcccagtttttttaggcagtcacattaaaattctcattaataatgttgacagacaattacgtttattatttctgctaataggcatctgcattcctattcagaattttcattgttagtctataaagtctagttttaactttggaatgtttggtagaggaggacatctatacattttcttttaactgtcctttctaatgtggtacatttgtgacagtgtttgaattctgggttttcagtgaattatggaggactaaaataccaggagtagtccgtactgcttctcttatacatgagagatatctaaggactataaaacataacttaagtatacccttttaatgcctttgtaagatttttaaaccaaggaatgactgggctatctataaacccagatgcactaagtggggagaaaagctcggagctgcagcatatcagcttttgtcaacctgccaacagcagagcgtaccatgctgcaaggagtaataaacaaggaattagaaaactcgctgctggagaacagtcaaattaaacacctttttgaaaggatgagcatgtatatattgcagttctattaaatgtagcttcttagtgaggttggcattatgttaaggctggtatggaagagaactgatgaagcaggagtggtctggtgacatttttctgacttgattggctggggcgtgtgatgtaataggtttcagtgcagccccttataggttttaaaatgaattccaagacaccattacaaagaaagccggactcttttcttataactgagctcagccaaggaaactcttgcacaaatgtacaatactgtttggaatatggaagacctggatttagaatatgccaagacagatataaattgtggcacagacttgatgttttatatagaaatggacccaccaggtaatactgcagtattattgtagagagttagttaatttcgtggctttttaatttttcgaaagctactgtaaaagatcctttttggatttctgtttttattaatttgtttcattgataaaaattagtttgctcatggcttaaaaattaaacagattgtttgactgtctgtggaagcaagcagctcaggctgtgtgtggtaaatgcttattcttacttgaatggatatgaattgaactccagtttttcactggtgtcttttgttaatcgagatccttccctgggtgagttatgttgtgggatattgtccctgtaattaaaatgatgcatcttttgtgctgcttttctctgttgccagtggatgagaacagtgtagcactttgcagtgataacacttggtactttagaaagcatgtaaaatgtagcagtgattacaactcagttctctaaatgttgagactttgcttgctctctcatattaagatattataatgaaaaaagaagttgactttccattattgttagtctttgtaaaatattcttggtagatacctgaaatcattttttgtataagttaaaatagtaacagtgctttaaaacttatgacagaatttacctaaaaatcctagatttattttgtttcctaagtaagttgttttattccaatgttagctctccccctgcccccatttaaggtattcaggaatactgcagtcttttatttgtcaccaattggtatatatgaatactgatttgacattgaggaagggggatatcatttttaatcagacctagtatatagagcacaatttatccaacagaatattaacatattaaagagatttagggcacagatgagagtttcttaaagtggcttttggcagaacagtgcctgaaatactaagattagagaaacccaattgctcctcttaaaacatactgctgtagatgagcctttttattactgcaacagagtttgtggaggacagagaccaaatttgtctttcgtaattaaataagaggaaattaaagccaactcatgttattcctgctactcatatgttcatagtttcttactttagatggatttgaccaggcatgaaactttaatataactagaatctagaagtacagaatgtcatgactctggatttactttgaaatttattcacatggccagcccaatttatttgttagtttctaaggctctctctcttttctccttttcagtttcatttctttttgagccatgctctgaaagattttttttaagaaaattatcttccatattgcatggaattgtgaactaatgctatatatttcagttactctaactttttatttttttaaagtaaaagtattcatctaaagaaatttagttctaatgtagttgggattgcgaacaactttttctttttcatctgcagcactgcctcctaaaccaccaaaacctactactgtagccaacaacggtatgaataacaatatgtccttacaagatgctgaatggtactggggagatatctcgaggtaaggctacagaaacttcattttcagagagttttagattaaaagaaagaaaagcaccagcttgctaagttccatttttaggatatcatccaacataagcatgaagcatagttggttctcttccaaagacgaccagaaaaagtcactgagcactggagaactgtgggtgctggatgccacaggaaattaaatacccgggaagtttcattattgacagagatgtcagtgaagtgccagagtgaagtggcactgcctaagaacagagtgtgaaggcactctatctattaagcacaactctaagaattcttgccttaaacacaataagaaaacaatgccattttatgttagctttgggaagggggagtaaggttggagaaactcttttgagatcatgagtttctgtgctcatttgtcagagagattgtaatgtttggttgaaaaaataaaaacttagtaccacagatacaccaatagtgaaagtgatatgcacctgtttgtgatgagactgcaattgctaacatttctatttaaacaaattattagctcttattagtgagctctgaaaatgcaattcattaatttaaatctatgtgggcaggaggaatatgggcactcactgtactttccacttgattttgctgtgaacctaaaactgctctaaaaaatagcctattttaaaaaatataaatctgtggtcactaaaccttaagatgagcattgttttgtgttttcatttcagggaagaagtgaatgaaaaacttcgagatacagcagacgggacctttttggtacgagatgcgtctactaaaatgcatggtgattatactcttacactaaggtaagccagggaatatagctgaaattagggttttgggctgatattaaaacatatttccttattccaaaatgttaatacctttatttttatattgtttttacaggaaagggggaaataacaaattaatcaaaatatttcatcgagatgggaaatatggcttctctgacccattaaccttcagttctgtggttgaattaataaaccactaccggaatgaatctctagctcagtataatcccaaattggatgtgaaattactttatccagtatccaaataccaacaggtaataaaaactgaatgaattatccagttacgatgtttagacaagatccttttaatacttagaaaacatttgaagcagatgaattacatgtaatcaagtctaaaaaacttgacactcgtaattacataattgcaattttaaagatgtttccatgtcagctattttgttaaacaattgttatttgattaaataccttatccattgaatttattttaatctttctaggatcaagttgtcaaagaagataatattgaagctgtagggaaaaaattacatgaatataacactcagtttcaagaaaaaagtcgagaatatgatagattatatgaagaatatacccgcacatcccaggtgagttttctatgaaaatcagattaaaaaataagagttctaaacttttaaagactaacatggaaaaaagaatttaaaaggttgagtttttacgaatgaggtgggggtgagagcatttatttgtgaatcattgttgattattctagtgtaatatctctaaagctttaaaccaaaaattttaagtatcagaataataaattaagttcacgtgataactgaagcagtcactgagtttcaagttgatttaattcgtgatagaaggatcctgtttagattggaagttagtaataactggaagtttcacagacttgtctaatccctgaaatggagatttaggcattaatatatatcctaccatgaaaaggaagggctatatactgctgtgcttttctagacccttattcttcactggtcactcatgtatctgggaatgccagagggaacagaaaacaacagggatgctataaactacaatagcttttaagaagataaaaactataggaaattgctacgcaatcatttttcatagattgagaaaattctccagaggaaatacttgtttctgggatactgttttaatggattttatgaatttgagtcccactctgctaataatacagatcaaatgtcctggtagtgtcttgcagtaagagattgttctatgaaaggtatgacattatctttttaaaattatgttgcaggaaatccaaatgaaaaggacagctattgaagcatttaatgaaaccataaaaatatttgaagaacagtgccagacccaagagcggtacagcaaagaatacatagaaaagtttaaacgtgaaggcaatgagaaagaaatacaaaggttggtgtttcccttgttcttgtgctagagataaccaaaatcctctaaaaccatttaaagatgatctcgctttctgtgctttgaatgatcacgtggacacaggaaggggaatatcactctggggactgtggtggggtggggggaggagggagggatagcattgggagatatacctaatgctagatgacgagttagtgggtgcggcgcaccagcatggcacatgtatacatatgtaactaacctgcacaatgtgcacatgtaccctaaaacttaaagtataataaaaataaaaaaataaaataaaataaaatatgttgagccactccaaaaaaaaaaaaaaatgacaggaagagaagccacgctttacctaaggaaaactgctgggaaaccatagtgaaacttttcataaactttggggaccgttcctgatgtacccagataataacaaatacgtttcttttgcctgcaggattatgcataattatgataagttgaagtctcgaatcagtgaaattattgacagtagaagaagattggaagaagacttgaagaagcaggcagctgagtatcgagaaattgacaaacgtatgaacagcattaaaccagaccttatccagctgagaaagacgagagaccaatacttgatgtaagtatttgaaatggaatcctatacatgaataattggtgattgctacaattcaggatgagttaatgcgttctcttttcaaaactgtttttcaggtggttgactcaaaaaggtgttcggcaaaagaagttgaacgagtggttgggcaatgaaaacactgaagagtaagtagttactaaagatggtgatagcagaagatttttctcattttaggaaaatgcatgacttgctttgtttttagaacaagtgaggaattttactgagtttggaacatcttgtaggagaaaatgtataaactcagtgccattatccagaattttaaaaaaagaaagcttagctaaggaggactaggatttatttttactcataatgctgtgaaacaactctctgtgtccataatgatgtccctgaacatctgaaaaatcccaaaatatttttggaacagtcagagaaaaaataattatgcttaatatattttaaagcttaagtatatactttgtttgaattagtcaaaaactggcaatctgcctagtcaatttcctgatctaaactggataaacgagattgttttaataccttccactctgcccaggtacctgagtgtggttgcttgaaaacagaaatagtacagttgattggtaactctttgtcctgggaggttgcactggaggctgaataccaggagaggaaaactcaggtcgggcagaggcaggcatgtgatggccagtctgactggcttggtaggggccaggagggaagtgacgggggtatgcctagggaagacagcaaggcaggctgatggctcctgcactcttcatttagaaactttctgtcctgcctgcctagccaatattcactggtggaagatgatgaagatttgccccatcatgatgagaagacatggaatgttggaagcagcaaccgaaacaaagctgaaaacctgttgcgagggaagcgagatggcacttttcttgtccgggagagcagtaaacagggctgctatgcctgctctgtagtgtatgtatctccagcaaacttttctttacaacatctcatgaagagatgtttcatttattcattcattgagttttgggggcaaagatttgacatagttttagtcttgaataagcttacagtacaataatgtagaagagaaaccaaagcagctgtaataccattttaaagtctagccagaagtgtatgttaatacagtctaatagatacctactgtttagttggaagactaggtttggattcccattcagtgctaattaatcatgagaaatcgccaagtctttttttctcatctttaaaatggaagtggcagtgcctgccttttttgcctctcaaggctactatagttagaatctgaggtaatttatgtgagaacatcacccataggaaaaatactcatcaggaacaggtgaaaaaaaaaaggattctgatcattatccttgagataggtacacccacattggatcactgacatcaccatttccaagaaattaatgtcctctagtagggaatggttctaaaagtatgttacactccatgatcacctttcatttaatgagagaaatagtcctacagcaaagaagggtacttttgtccttactgtgcataagggcacatgcagagatggagagttgtgcagacacctcaaggacagccagaaagaaggaatcctatgaatagtcataatgggagtaatagtaacactgctagtcatggagcactgcagatagttgtcctcatcatgattggaagctaccacttgttgcatgcttactgcatgtcaggcattctatctagcattttgcatgcatgatctcatttcatttctcaaagtaactgtattacatgcattttactattgtcttccctttaaaccattttaaagatgaaaatacagtcagtcagtgaagctgggttacctacccaaggcactcggccaggtgtcagttgtaacctaggaccctttccccaagttgagactgcacaataatgctttttattaaagatgccctgaagagttgtgaattgtcttggacaagctcaaaagacagtttttcttctctcctctctagggtggacggcgaagtaaagcattgtgtcataaacaaaacagcaactggctatggctttgccgagccctataacttgtacagctctctgaaagaactggtgctacattaccaacacacctcccttgtgcagcacaacgactccctcaatgtcacactagcctacccagtatatgcacagcagaggcgatgaagcgcttactctttgatccttctcctgaagttcagccaccctgaggcctctggaaagcaaagggctcctctccagtctgatctgtgaattgagctgcagaaacgaagccatctttctttggatgggactagagctttctttcacaaaaaagaagtaggggaagacatgcagcctaaggctgtatgatgaccacacgttcctaagctggagtgcttatcccttctttttctttttttctttggtttaatttaaagccacaaccacatacaacacaaagagaaaaagaaatgcaaaaatctctgcgtgcagggacaaagaggcctttaaccatggtgcttgttaatgctttctgaagctttaccagctgaaagttgggactctggagagcggaggagagagaggcagaagaaccctggcctgagaaggtttggtccagcctggtttagcctggatgttgctgtgcacggtggacccagacacatcgcactgtggattatttcattttgtaacaaatgaacgatatgtagcagaaaggcacgtccactcacaagggacgctttgggagaatgtcagttcatgtatgttcagaagaaattctgtcatagaaagtgccagaaagtgtttaacttgtcaaaaaacaaaaacccagcaacagaaaaatggagtttggaaaacaggacttaaaatgacattcagtatataaaatatgtacataatattggatgactaactatcaaatagatggatttgtatcaataccaaatagcttctgttttgttttgctgaaggctaaattcacagcgctatgcaattcttaattttcattaagttgttatttcagttttaaatgtaccttcagaataagcttccccaccccagtttttgttgcttgaaaatattgttgtcccggatttttgttaatattcatttttgttatccttttttaaaagtaaatgtacaggatgccagtaaaaaaaaaaaatggcttcagaattaaaactatgaaatattttacagtttttcttgtacagagtacttggctgttagcccaaggttaaaaagttcataacagattttttttggactgttttgttgggcagtgcctgataagcttcaaagctgctttattcaataaaaaaaagaaatgaaaaagatatatgaatatgacaaagtattgctgagtccaacaatgttgttttaagactcttaaaatacggtacctggcaatgtttatttcataaagaattgtgaacttcttgaatctagggagggggaatgtagtgaagggatgtatcaagtggggtggtgggagggggaggcaaggttatatgcactttctcatgatttacagagaagtgaataactgcaaagtgaagttgcttcttctacttcagtcttctctcactttgatttgctagttgttatcaattaatgacaattacaaacctactgtatctctaatacagtgtgactggtcaggtatttcagttcttaggaaggaagtgccaagtttgtttttgggttcctggaacagcgctcacctttgtttagaacactggtttaaagggataatcatctctgtcacattagactatccatcatgaccagcaaatactcattttaggaaaaaaaaaagcatgatctgaaaaatacttttggtggtatgttggttaccctcctagctttccatttggtttagaacataaagcaaatagacacagtcatactgtcactgctctggactgtgtggagctcgctaaagtcatggtcattgcaggaatccaagtggcagtccttctcattcattctaatcattgtatgtgcttcactacgggggggagaaggaaacgttagcatcatgtttcccatttagggcaggagtgagaggtctctcttcctgatttagatatgcaaaagctggtatgttcagtaggaactgtacatgtgttgggaggcataaagactaattagcaaccataatatggtcactaccctaatagactaaatgaaatcttgcaatttcaaattactctttctccatattagatttacccacagctatatttctgtttaagtactagggtgagggttttctgttactttgttttttaatgttgttccttttgaaagaatcagtcttgcagctgagtgaaaaatctgtggaatgtattatttgtcctctttacatgaaactactcatacttaagcaaaagtcagtcttatagcaagactgttagccctcaaacttgactctactgatctgaccatttccctctcatcgccagacaactgacgatttccctggttttagtctgcgtctctgctttaaagttattgtgatatccttctagatcatacacaagtctaacagttaattagttaacagtttttaaactaggtttgtgggtatttttttggtagcacatgtatgctattacatacaaatttttatttctaaaatataagatctgagattgaatattttcattaaaagctacagttttgtgaatctttgtgcttcaacattctttgcaagatgatacggtatttaggcatttgccttatttttgcatctcacaaacataagtgcaatagatcttttcattgaacagcaaagtaggattcatcattccatatgacttgagttacaccagacctgttctgcccaatgcctttttgattacagtgtagcttgcccaccgcatttgtcgttttagatactttgctagccggccactttggatttcatcagacagtcctaacaatattgtctgaacggctgaatatgaatagatacagcagaggcactcctgatatatgatttttatccatgcgtcagtttttcccacccagtgtagcatcctaaagataaagccagaagctaagctgcagtgaggctgtgattgggcgtagaagtgggagcattgggacctcacattacacacacgagagatcataaccatgtgaaaaggcaaaaagcatgtgtttgcaacatctgataacttcatggcctttgataaatgtatatatgtatatgtgcatggactgtgtttccagtacacctttcagccaaaacagatccacagtagttgttgagttcaagtacataaagtacataacaagcgaacgtctagtacaattcttacttatgtgtatgggatttttccctttgaggttgctttgttttgtcttacaaaggtgaaaattgtttgtaagtgaagtgagaagttcatatttctttggcttttttgtgtttttaaaagttactccttttagggagctggtctgatgacttgcttagcttggaaatccttgttttcagtgtgtcgagtcaaaatgtgtttatgtgagctgtcactgtggggaaccaattgctttgtcatatagctggttatgaactagtaacatgtttgggaagtcctactgatgttcctttggaagaaaaaatctgctggttttaacaactgtgcttttgctatgtatggtatccaagttagttgaaacgcagacactgagatctgtttgagtttagggtcatttttagaaaggggcagtttaaagcacaatgtctcacatgggacaaagttccaaaatgccaaattcttattttttaaaaagctagttctataaaatactggtattatgggtggggaggaaatagaattgagtcaattggaaagactatccaacttaacatgaaacttgtcaccatgagatagcattagctgcccaggatgctgctatatatatatatatatatatatatatgtgtgtgtgtgtgtgtgtgtgtgtatatatatatatatatatatatatatatgtgtgtgtatatatatatatatgtgtatatatatatgtatatacatatatgtatatatatgcatatatatatatgtatataaataataatcaaaacgaaaaaaaactcatttatacctgtgtattttttaaagctacaatctgttcaatgtttttaaaaatctgtttatatgacattgttaaaataaagttggtcttttgacgagagggaggatgtcacggtcagttgtaactttgccttcacaaggcaactggggtggggggtgggggtagtgtgcctccttgacatttcgttcaagttatagattcaatggagctatgtcttgttttaagttgctttaatgcattgtattagatcttcaaacagaataaaggttgttttgaaactgaagttttgggttgaaatttcacttatcacctaagaaatctttctaaaacagctaccttttggcttataaatgttgctgctatttctgttgtctcccacccactcccttttgattgttatcacagtatctcatttttgtaaagttgagaaggacattgagtggtcacatgtaagtaatacatatgagctgtctttcataatttcactgttttttgagacggagtcggagtctcactctgttgcccaggctggagtgcagtggcgctatctcggctcactgcaagctccacctcctgggtttacgccattctcctgcctcagcctcccgagcagctgggtctacaggcgcccgccaccatgtccggctaattttttgtatttttagtagagacggggtttcaccgtgttagccaggatggtctcgatctcctgacctcgtgatccactcg

SEQ ID NO: 197 - DNA, 3358 bp, Homo sapiens
tacaaccaggctcaactgttgcatggtagcagatttgcaaacatgagtgctgaggggtaccagtacagagcgctgtatgattataaaaaggaaagagaagaagatattgacttgcacttgggtgacatattgactgtgaataaagggtccttagtagctcttggattcagtgatggacaggaagccaggcctgaagaaattggctggttaaatggctataatgaaaccacaggggaaaggggggactttccgggaacttacgtagaatatattggaaggaaaaaaatctcgcctcccacaccaaagccccggccacctcggcctcttcctgttgcaccaggttcttcgaaaactgaagcagatgttgaacaacaagctttgactctcccggatcttgcagagcagtttgcccctcctgacattgccccgcctcttcttatcaagctcgtggaagccattgaaaagaaaggtctggaatgttcaactctatacagaacacagagctccagcaacctggcagaattacgacagcttcttgattgtgatacaccctccgtggacttggaaatgatcgatgtgcacgttttggctgacgctttcaaacgctatctcctggacttaccaaatcctgtcattccagcagccgtttacagtgaaatgatttctttagctccagaagtacaaagctccgaagaatatattcagctattgaagaagcttattaggtcgcctagcatacctcatcagtattggcttacgcttcagtatttgttaaaacatttcttcaagctctctcaaacctccagcaaaaatctgttgaatgcaagagtactctctgaaattttcagccctatgcttttcagattctcagcagccagctctgataatactgaaaacctcataaaagttatagaaattttaatctcaactgaatggaatgaacgacagcctgcaccagcactgcctcctaaaccaccaaaacctactactgtagccaacaacggtatgaataacaatatgtccttacaagatgctgaatggtactggggagatatctcgagggaagaagtgaatgaaaaacttcgagatacagcagacgggacctttttggtacgagatgcgtctactaaaatgcatggtgattatactcttacactaaggaaagggggaaataacaaattaatcaaaatatttcatcgagatgggaaatatggcttctctgacccattaaccttcagttctgtggttgaattaataaaccactaccggaatgaatctctagctcagtataatcccaaattggatgtgaaattactttatccagtatccaaataccaacaggatcaagttgtcaaagaagataatattgaagctgtagggaaaaaattacatgaatataacactcagtttcaagaaaaaagtcgagaatatgatagattatatgaagaatatacccgcacatcccaggaaatccaaatgaaaaggacagctattgaagcatttaatgaaaccataaaaatatttgaagaacagtgccagacccaagagcggtacagcaaagaatacatagaaaagtttaaacgtgaaggcaatgagaaagaaatacaaaggattatgcataattatgataagttgaagtctcgaatcagtgaaattattgacagtagaagaagattggaagaagacttgaagaagcaggcagctgagtatcgagaaattgacaaacgtatgaacagcattaaaccagaccttatccagctgagaaagacgagagaccaatacttgatgtggttgactcaaaaaggtgttcggcaaaagaagttgaacgagtggttgggcaatgaaaacactgaagaccaatattcactggtggaagatgatgaagatttgccccatcatgatgagaagacatggaatgttggaagcagcaaccgaaacaaagctgaaaacctgttgcgagggaagcgagatggcacttttcttgtccgggagagcagtaaacagggctgctatgcctgctctgtagtggtggacggcgaagtaaagcattgtgtcataaacaaaacagcaactggctatggctttgccgagccctataacttgtacagctctctgaaagaactggtgctacattaccaacacacctcccttgtgcagcacaacgactccctcaatgtcacactagcctacccagtatatgcacagcagaggcgatgaagcgcttactctttgatccttctcctgaagttcagccaccctgaggcctctggaaagcaaagggctcctctccagtctgatctgtgaattgagctgcagaaacgaagccatctttctttggatgggactagagctttctttcacaaaaaagaagtaggggaagacatgcagcctaaggctgtatgatgaccacacgttcctaagctggagtgcttatcccttctttttctttttttctttggtttaatttaaagccacaaccacatacaacacaaagagaaaaagaaatgcaaaaatctctgcgtgcagggacaaagaggcctttaaccatggtgcttgttaatgctttctgaagctttaccagctgaaagttgggactctggagagcggaggagagagaggcagaagaaccctggcctgagaaggtttggtccagcctggtttagcctggatgttgctgtgcacggtggacccagacacatcgcactgtggattatttcattttgtaacaaatgaacgatatgtagcagaaaggcacgtccactcacaagggacgctttgggagaatgtcagttcatgtatgttcagaagaaattctgtcatagaaagtgccagaaagtgtttaacttgtcaaaaaacaaaaacccagcaacagaaaaatggagtttggaaaacaggacttaaaatgacattcagtatataaaatatgtacataatattggatgactaactatcaaatagatggatttgtatcaataccaaatagcttctgttttgttttgctgaaggctaaattcacagcgctatgcaattcttaattttcattaagttgttatttcagttttaaatgtaccttcagaataagcttccccaccccagtttttgttgcttgaaaatattgttgtcccggatttttgttaatattcatttttgttatccttttttaaaagtaaatgtacaggatgccagtaaaaaaaaaaaatggcttcagaattaaaactatgaaatattttacagtttttcttgtacagagtacttggctgttagcccaaggttaaaaagttcataacagattttttttggactgttttgttgggcagtgcctgataagcttcaaagctgctttattcaataaaaaaaa

SEQ ID NO: 198 - DNA, 2175 bp, Homo sapiens
atgagtgctgaggggtaccagtacagagcgctgtatgattataaaaaggaaagagaagaagatattgacttgcacttgggtgacatattgactgtgaataaagggtccttagtagctcttggattcagtgatggacaggaagccaggcctgaagaaattggctggttaaatggctataatgaaaccacaggggaaaggggggactttccgggaacttacgtagaatatattggaaggaaaaaaatctcgcctcccacaccaaagccccggccacctcggcctcttcctgttgcaccaggttcttcgaaaactgaagcagatgttgaacaacaagctttgactctcccggatcttgcagagcagtttgcccctcctgacattgccccgcctcttcttatcaagctcgtggaagccattgaaaagaaaggtctggaatgttcaactctatacagaacacagagctccagcaacctggcagaattacgacagcttcttgattgtgatacaccctccgtggacttggaaatgatcgatgtgcacgttttggctgacgctttcaaacgctatctcctggacttaccaaatcctgtcattccagcagccgtttacagtgaaatgatttctttagctccagaagtacaaagctccgaagaatatattcagctattgaagaagcttattaggtcgcctagcatacctcatcagtattggcttacgcttcagtatttgttaaaacatttcttcaagctctctcaaacctccagcaaaaatctgttgaatgcaagagtactctctgaaattttcagccctatgcttttcagattctcagcagccagctctgataatactgaaaacctcataaaagttatagaaattttaatctcaactgaatggaatgaacgacagcctgcaccagcactgcctcctaaaccaccaaaacctactactgtagccaacaacggtatgaataacaatatgtccttacaagatgctgaatggtactggggagatatctcgagggaagaagtgaatgaaaaacttcgagatacagcagacgggacctttttggtacgagatgcgtctactaaaatgcatggtgattatactcttacactaaggaaagggggaaataacaaattaatcaaaatatttcatcgagatgggaaatatggcttctctgacccattaaccttcagttctgtggttgaattaataaaccactaccggaatgaatctctagctcagtataatcccaaattggatgtgaaattactttatccagtatccaaataccaacaggatcaagttgtcaaagaagataatattgaagctgtagggaaaaaattacatgaatataacactcagtttcaagaaaaaagtcgagaatatgatagattatatgaagaatatacccgcacatcccaggaaatccaaatgaaaaggacagctattgaagcatttaatgaaaccataaaaatatttgaagaacagtgccagacccaagagcggtacagcaaagaatacatagaaaagtttaaacgtgaaggcaatgagaaagaaatacaaaggattatgcataattatgataagttgaagtctcgaatcagtgaaattattgacagtagaagaagattggaagaagacttgaagaagcaggcagctgagtatcgagaaattgacaaacgtatgaacagcattaaaccagaccttatccagctgagaaagacgagagaccaatacttgatgtggttgactcaaaaaggtgttcggcaaaagaagttgaacgagtggttgggcaatgaaaacactgaagaccaatattcactggtggaagatgatgaagatttgccccatcatgatgagaagacatggaatgttggaagcagcaaccgaaacaaagctgaaaacctgttgcgagggaagcgagatggcacttttcttgtccgggagagcagtaaacagggctgctatgcctgctctgtagtggtggacggcgaagtaaagcattgtgtcataaacaaaacagcaactggctatggctttgccgagccctataacttgtacagctctctgaaagaactggtgctacattaccaacacacctcccttgtgcagcacaacgactccctcaatgtcacactagcctacccagtatatgcacagcagaggcgatga

SEQ ID NO: 199 - DNA, 96599 bp, Mus musculus
  misc_feature (4189)..(4208): "n" at positions 4189 through 4208 can be any base.
  misc_feature (9652)..(10001): "n" at positions 9652 through 10001 can be any base.
  misc_feature (27805)..(27824): "n" at positions 27805 through 27824 can be any base.
  misc_feature (54062)..(54139): "n" at positions 54062 through 54139 can be any base.
  misc_feature (88386)..(88405): "n" at positions 88386 through 88405 can be any base.
ggaatgacgctttacactacgaggtaggcaaggagatgcggatgaacacatgcggatctctgatgcggatgcacagaagtttgtacccaggaggctggagtgggaggtcccgttttttggtggggtaagggggggtggggcaggggtgaggtagggtctttctattacacatcatttggcagtccaggaacttgctacatagaccagtgtagccccaaatttgcagaaatgtacctgcttctgcctcctagtgcaagcactgggatcaaaggcatgcgctcccacacccagcaggcactcacagttgtaaagcctcaagagaaatgtatcaataatatcaaagacaaaagcaaagtgtacatttgaaaattaacatccgcgaacttaagaacagtaaaggaaggtctgttactcataaaatggagatttaatactagaggtttactttctaaaggtacttaactgtactcaaggatcattcgggataaaagtcaaatgctacaacaaacaaaagctaagactctcattaccattcagattatataaaaacctcggaaagagtgttgcagacagaaggtattctatcaatatctttttgatttaagaaatgaagaaatggaaataagatttatcactaaatatcctaaggagacagcaagacagcattttactgcaaatgggtataataaaaatgtatacggcaatttaacataccagaaaatgtttatgtgataaatggatatatgtacagagtcttattaaaaacctgagcaaagccgggcatggtggtgcacgcctttaatcccagcactcaggagtcagaggcaggtggatttctgagttcaaggccagcctggtctacaaagtgagttccaggacagccagggctacacagaaaaaccctgtctcgaaaaaccaaaaaccaaaccaaccaaacaaacaagaacccccaaaaacccaacaacaacaacaacaacaacaacaacaaaaaacctgagcaagatctagcaaaaaaaatttttttctcatgaattcttattacctgtgaactatgatgtaaaacaatccataccgaagtatcagaaaatactttgactttcaaccatacatgttcaaaaaaattaagaaaaaacaaaggattgattgataaggaattcaccttaggcattataactcaagaaggctatttaatagagtaatagtagtgacacacacagcagaaatgcctgtcagagcattccttagaaactcgccagatttccataagtgtgtatttgtataacttcttttgaaaatttcaaatgtacagaaatggtaaaaaggaaacagcagtataaagattgctatattctttacttagttccccagttgctaacatctgttatatttctttttatttgttcagtttgtaacaaggtctcatagagcccaggctagtcttgaactttctctgtagctaaacctggccttgagctgatcctcctgcctccatcttccaagtgctggattccagacatgtgtcatcgtatccaaaggatgttctctttatcaatttttttctgaccaatttaaagtaagtagaagacttactatttcaatcctaagcatcagcgtttaccttataaattaaggattttcatattaataattaatactaattcacaaccatcactggacaaatcctgtttaaattttcttcattaaaacaaataaataacaaacaaataataataataaaaaccagaacaaaattgttctgtagatttctatccagaccttaggtaagtttcttttgttgctttaggttcttttgtcttttaaacagcaacagccccctacccttgattttcccccctgaggttgagtttgatgtcatctatcctgcataacgccccatggtctatgtttgtttcctgtggttacaaacacactgatatactttagctcaaataacagatgatgcatcatcacatccacatgacgtggagtttagtcctgttggtgattggtgatgctaaggctcccacataacacacacacacacacacacacacacacacacacacacacacactcacacacacacacacacacactcacacacacacacacacacacacacacacacacacacacacacacacagactcacacactcacacgcacgcacggtggttaagtagatcttacacagtgggaaagaattctgagaaactgtcatagcctagctacttgcaacagtaaaaacctatactcagaaaactctattctaattgggcctagagtttgcctgggatctcaactactccaacagcagaggcaggaagatggcaagttcaaggctagcctaggtaagttagcaagaccctgtctcaaaatgaaaactaacaaaaggacaggagatacaactcagtagtaaagcacttgccaaccgtgagcaaagttcaatctccaatactacaaataattatgacgcaaaaccctatattcaaaaagtaactgaattaaaaaccctacattcaaaggatatttgagttaataatttcctctgtacaattatcaatttagtatacaattaggtccattttttcatttctcattttcatctatactctgtattctttttaaaaagtagttactactattctctgtatgtgtgtaggatatatgaaggtgagcccacgggtgccacaatatggaggggagagtacatgttttggagttggttttctcctaattttacaagggttcttagttttgaacttagggtgtcaggttgcacagcaagcactttgctagtacaccatcctgccggtccttcattctattctgacccatccatgccttctagatactattattcttccaaacccatatatacacatagctgttttcccttatccatgaaaaatatgtttcaagtctcctaggagaagcctgaaactgtagatagaagcaaattttatattacttatttattgtaatacatgtacatctctgacaaaatctaagcatttaggcaaaaataacagagggtaaatagtaactaaaataacactattgtaacaatccactgttactaatttgacagtctccttttgggtctctaagtaaaataagggtgaattaaacatgatcagtgtgatactttgacagttgatctgataactgagccagctactcagtgactcatgggtcacatatcctttatggatgtgccgtgcaaagggagactcccattccagctctcattccaggttagacagaacaggatggtccaaagggctataactctactcgatggaatagaatttaaaacgtgaattattgagtagtggtgcacacctgtaatcccgatactcagaaaaaagtcaaaggcaggaagatggctccaagttcagggtctgcctggcctacacagtgagttccagagcagctagggccagaccctttctcaacctctctcctcaaaaaagaaaacaaaagcaaaactcttaaacctgatggactctttatttctgtaatttttcatttaatatttaaggccacagatgaccacatgtagctaaagccaaaggaaacaaaatttcagaaggcagtcaggaggaggttgctcttagactatagtcctccctcccctcctctgccaagagataacatatcattctatgccttcaataaaagcaagcaaacaaacaaaaaacttagtataggagactagagagatggcttagcacttaagaccacttactggtcttgcataagccccaggctggggtcccaacacctacatcaggtggctcacactgtctgtaactcctattctaggggatctgatgccttctcctggcctcctcaggcatctgcagacacacagtgcacacacagacaagcatgcatacacatatgtaaataaaaataaaaattaagcataaaaataaaatcacaaagaatatttttaagaactctgtggtggtttggatatgaagcgctcccaaaggttcggagatttgaatgcttagtcaccagggagtggaactttttgataggattagaaggataagtaggtgtgaccttgatggaggaagtgtgtcattggggggtgggttttaatgtcaggctcaatcttgttctcttcttcttcttcttcttcttcttcttcttcttcttcttcttcttcttcttcttnnnnnnnnnnnnnnnnnnnntccctctccctctccctctccctctccctcttctccttctccttctccttctccttctccttctccttctccttctccttctccttctccttcttcttcttcttcttcttcttcttcttcttcttcttcttcttctttttcttcttttttccccccaagttgaatatactaatgtggggtccgatcatctgactagtaggattatctaaggtccatcagaacgcaggattcaagatggaaatactggctagacataaactcatttgcaggggagacaggtgaggcccagcagagcctggcctgtctcagtcatctgctggaaccacatagggattactctggcactatctacttatttgcctgcagtttcttgtggcggtgtgactgcccaagaggtgcagtggggttgagacatgcttgcaagagctgttgaccaaaaaaatgtctgtaagaatttaaagtgcacggttgtactgtcttgatgttcacacaacatactacaacacaaaaggaaggtgttctgtctgtctagatcacattcttgcttggctccttaagaacagcaaaaacaatgtttggggcaaaagcttccagcatgcctacccacatatggctacactagactgtgggagggagtacccaagaacagacaggctgtgttcaatgaaaaaggacttgcgcctactttttcatgaggtgagggctcagaagttgaaaagataaagggagggtatgctccttaggctactgagacacagcttggtaatgccccacagcagagcagagagaactggacttgcgttcaatctttttgggactgattgagaggaagaaagcacactcagttctacagaggacatggtccattgttctaagaaagacccagggtagttttaaaacaagtctgagccaggcacggtggcacctgcctttaatcccagcagatctttaagagtttgaggccagcctggtgtatatagtgagttccaggccagtcaaaaagtctcacacagtgagatcctctcaaaaaacagaacaaatgaaaaaagctctacagtatccagaagagaaacaagagagaaagtgcaaactttggtgtctaaagttcaggatgccagtctgccaacattttcactacataatctcataatgggtaaactccaatccctgtttattgggttgtttgccatggcttatttgtattgctttgttgctattgtttttagatagcatctcactttataatctgggctgggggacctccaattgagcatcctcctacctcactttcctgaatctaggattacatgccactctacctggctttgtcttgttttttaatctaataataacaatctagttaagatagcttatctagcaatgacaagctacatcaaacacaacaaagaaggatttaaacttatctattatattacagtacagtgaggatcagatattatagtcttgccttttgcaaactgtaaaaattaccttcaaaattcaaagtaaactaaaggtgacttatctctttgctccatcacgtctggggcttcagcagaaagactcaatgcctagggctatcttcatgattgaggactggagagctcctgaagacatatttactgacgtggctgatcattaaactggaaccaagctaagtatccatacacaattgcactaccttcacgcactctcagcttcctcagtatggctgcttcagggcagtcagacttcgggcctctacgactgtcacatgccttctgttgcagtagcaagttgaaaactgtttgattctttgtggtctagatcccaagggcacacagtatcacatctgttgtgttttattatatacaggtaagtcactgagtctggttcaagagggactatgcatcctaccttctgatggaagttggatcaaagaatttccagccctttttgtgttttctttccgatttttatgacaggggtttctctgcatagccctgactgtactggctgtggacagtcaggggggaatctctgagattaaaggttagtgtacaagcccccacccccagcttgcttttatttatttattttcttttttaatgatgggactttcaaatggccccccaaataccggatagctaaaatttgaaggcaactatcctactttgctttctattgttgtgataaacaccacaaacaaaagcaacttagggagaaaaggttgattttagtttttaggttatagtccatcgtgtatgaagctcgggcaagaactcaagctggaacctggaggggaagacgggatgaccacgaaggagtgctgctcagggctctgcttcccgcgctttgctcagcctggctattatttacgaattatgtattattgcagaggaagaacagcttttattagaggaagtagacaaatatatgtagcaggtatagagaaaaatgtcttacacaaaactgatcccaggctcgagaagctgaaaatccatgtcttcttcaggtctcaggcttttcaagtttcggaaaggtcttagggctggtcagtttgcagaaagacaggggcggctgattggcccacatctattgtgtaaacctgtccagatctggccttgaacttgttaaaccagtccatccgcagtggggcatgctggcaggagaaaggcccacaaggcctttgttttaagctgtgatgcttttgtctcaggtcagaagggcgaggaggaagaagccagccatcttgaaagttcaacatctttattacttagtcatggcccttctccctatatgtctgcctaccaaggactctgtctaactcctagtccttcatgctgtcctttgaaaggtcaccctaactgctgttaggggtttgggggacaggcttctcacttgctttgagctgaccaaagggatgagaattgaggggcaacagtcaaagtgcctcagaggaggcctgacctaagggctcaggataaaacttaaccactggcaatgatctagaacctaaaacagcctttggcaatactgtatattctttttgtttgtttgtttcttgtttttgttttgttttgtcttgtttgagacagggtttctctgtatagccctggctgtcctggaactcaatctgtaggccagaccaacctctgatttagagaggtcacttggctctgcctcctgagtgctggggtttaaagggatgtgccaccagtgctcagctggtagtatgtattcttgaagtgtcacatgagagatgtatcatcagcagtagacatctctgcccacgtaccagaggtaatgtccaatggaagtgggctacataggccaaatctgagtgacatgcagattctatttgttaaagtcactagacatcagcatctaagtgacaactttgatgagttggtggtcctggaccagaaatcctggacaaggtctcaaaaatgttaacaatcggggtctttatttacttttctctgccagttaaagagtaaaaggcaggaaagatcttaagcttgtctggtagcagtggagaaatctcaaacatagccagcaggagcagacaggatcagcagttgaagaaaggcctttactgagggtgaggaaacacacacacacatacagcaggaacaccattagttaacaaaactaaccaacacacaaggaaaaaaaattgaatgagtggaaactaacagaatccatcttaaatggatgaggccagccatcctgtgaagaaataatcacataagacgtgatcactgtatagactgatgctgataaggatgttgtttaaaatggaaccatggaaaatgtcttagaggcagggcatgggggtacatgcctttgatcccagcactcaggaagcagaggtagtcagatctctgggaatcaagttccaggacagccaagcgctgttacacagagaaaccctgtctcaaacaaaacaaaagagaaatgtcttagaaattttaatgttgtaaaaaaaaatgttataatgatacattcttagggaataatttcctaaagtaaacctggacagttagggactaaacaacaacaacaaacaacaacaataccccaaaaccccaacagttgtgtttcagacaaaatcaaggaggaagtgtcccttgcctggttgttggccctattttagtatgcttagacattatgtatttatggtttttaaaaactgccttaaactagcatagcttgataatatagtctctatctgtgatcatctccttcactcgaatctgtcagatcatcttctgacttaaatgtagctctcaggggaatgtccctgcttggaagagaatgtacaatgtcattggcaaacacagaatagctatttgattggtggcattttttttcaatacacaagaacgtaatgctttgattcaccaagcagccacacgtgcactgcttaccttgaagcaaagcatcagttgccgggcctgtgctgatcagaccaaataggcagacatcctattgtcagaagctttctacctttcaactcatcctaaatgcaataaagaggttggtggcgaccatccccctttccattaatagaagtgcacacacagacacacagacaactcaactcaagagttaaactggaaattcctgaatagtgttggtagcttctgtttttcactcctgttttctctttttcttaacacacttcctctctccattatttccttctttggttaaacgtactttaaccatgtaatttacataaagaaattgggtttaatttctgcaacttgggcttctctgagatgatttaattctcttctcccaattctttttttcatatacagtttgaagagaatgccttggatcagtcaggatctacaaaatattttaaattattttctttggaataaaaattagctatgatgcataagatgtctaaaatggtcatgtgttctcctcaggtcctagtgcatggaaggagccaattgatagtaaatgactgaaactaggcaataaataccctgaagaccagctttagattttcatttatacttcaacagatcaagtcctttagggacaggatacaaacaccatactgagaatttagctgctccaagacagttctatgaaatttggcttggctgatgtttcaaccttggcgtttaaggtcttatttttatgacacccagagcttctttgtaacggcagtaataagtactacagactttccggccttcttccctctaggattttaacttctttaaaacaccaccccctgctcttctagtaaatcccacatgacagaacaggctgagaaaaaataggaagccggagccatggaaactgtgcgggtagaaacgtgtgagcgcgagggtggttggaggagaaggaacactcccctggcgacagcggcgcgagggtgctcctcggatgacgtcacgcacccaggtgacgtcacgaccgtgacatgcgggtgacgnnnnnnnnnnnnnnnnnnnnnnnnnnnnnnnnnnnnnnnnnnnnnnnnnnnnnnnnnnnnnnnnnnnnnnnnnnnnnnnnnnnnnnnnnnnnnnnnnnnnnnnnnnnnnnnnnnnnnnnnnnnnnnnnnnnnnnnnnnnnnnnnnnnnnnnnnnnnnnnnnnnnnnnnnnnnnnnnnnnnnnnnnnnnnnnnnnnnnnnnnnnnnnnnnnnnnnnnnnnnnnnnnnnnnnnnnnnnnnnnnnnnnnnnnnnnnnnnnnnnnnnnnnnnnnnnnnnnnnnnnnnnnnnnnnnnnnnnnnnnnnnnnnnnnnnnnnnnnnnnnnnnnnnnnnnnnnnnnnnnnnnnnnnnnncggcgctggcgccgcggcctcttcggctgccgacccggccattcctgaagaggtgagtggcggcgccatccccccccagtgctcgcgcgtcaggggctcggcgggccagtgtttatgcgagggaccgaggcagcagaaggagccccggcagtgcttggtagccggcggggaggtggttatcggccgagtgtccccctctgtcttgtagctcctcgctacgtaaacacacacgatggcccaggggggttccccggcccccacccagatgggattggggcagtgggggcagagctggagccttttcagagggggcgaaactctgggttggagaaggtcacgcctggctgaggcttccagccctgcatccctgagatgttttcctttttgctagccggcagggacggcgtcgaggatggagcttagtggccagggcagtaccccttggtcccctagccctaggaaccgccgtgtgcgattactccctgatcctggggatgacggagcgcatctttccactctcctcactatcttccctttgcaggcccttgtccccttcccactttgctacttgtttgggggatttttcttttgaccggtttttgcccaggggatgatttttttttttggtgtagtctttactttttcagccccaaattttactgttccgaagcttttcccatcctggtctctgatccccgaataatactgtttgtcagtgctcccttgctgacccgtaaacctctatcctcatccaccaccccgctcatttctcaactgtacctacttgcttctaaccttagtttccacggaagagcatttttgctcttctcttgccctagtccccttgagtgcctctacttcattccactgcaccgtcaccttgtaatccgttgttatcttcacaaatccttttggacactttgcaagctattcactccctgaaccccaaagctgtcaagattccatcaggtttcacttggccctttgctcccttgcactgctggcagtttgggttagtctttcagtgcacatacacacctcagttgatatccttcgtgggtttgtttgtttgtttgtttgtttgcttgcttgcttgcgtgctagcttgtttttagtgggtttaagtgatctggctcgctcccattttcgtcccatctttcgtgtttaccagtctttagtacttggcttttggtagtccttgtatcattcaacttattacattgtcaaattacctaatttattctcttttctctgtatgtaaaacttactacatttaccatttgggcactgtatcgcataaacaataccatatcttacaaacaattggctagaatacggtattttacaaacagttgtcgagagtgacttgtttctgttgattttacttgaagataaattttgtttaaagataaacttgctacttaagtttcccagttctcgtactacctccttatctctacagtgttctttttcctgcttcattatatttacttgggatgttcatcctccactctccatctatcgttagcagtctgtttgcaataatgtttgttttccatcttttgataccatctctacccagaatgtgttcagtaccatcatttgagccaccctacatttctcacagttttttttttttcttatttcttaatttgaaataattccaacgtaccacttgaattcatgctcaggtcagtttccatttgcatttatttccctcggcttcttctccagtctaaggataacactctttccctcatccctttcctagctcccttatccctagttaccatccattccgtcttgtttcctggcttttggtacttcacttgctgacacttcctcttgtcttccccacacctccacattccatcttatttataaacaactttgttccgttgacatggaaatttatttttaggatacattgtttttaatggagaaatgctaggggtcacatctgccgtctattttctccaggaatcggatatgcctttgtcttactaggcacaggtgtctctgggttttactatgctgcacatgcttggttgtcttgaactgtatagatgtgtgaggaccaggatccaagtatgggcaggttgatggatggagttagacaaggataattctgggatgtgacactgacttgagaactttgcgtcagggtattaggacagttggcatttctgtttggaagattttgctatttacttgggagagctagagcactggggtgggtcccttaccttggcccctcctgtcttctttctgaagtagtgagtattagggttgttactttctgtttgacactttctaggcaatccccatggaccacactgcctgaggacctctaggctagatgaagttaaattaaatcaccaataactgaaggcatgtttgtatctcctgaaactgtattctttatttagttaaaagcagatgtttcccattgcccccttcccagggtttaatgtttgatgatgctataaaaagagaaaatatgacaaatatacataacaaaataaattcttccggaaagtagtatggtggagcccaggcttgtcagaaactctgtgtggctgaggctgtagttaaaacttctgatccttctgccacttcttaaggctggaattactagcatgtgccctctacccaacaagtttaaagttaacatcaactcagaggaaactgaagtatcctgtggtcttttaattaattgtcttttattatgaacttaaaggaatatctttagttactaaagtagatggaaagatgaaaatctgtgaatgtgtttaatgacattttattatacatttttatcttacctgggtttaaaaaagtttgtcaaagagaaatttcagctgtaccaaaaagtaattacaaaaggaaaacatatccattattgaaaaattagggaaaaagtacaaaaagtgcccataatatataattgctataaatatttgcatgtattacaactagtgcttgcacaatgcattttatatatagacttgtaacttttgaaacaatagtacagcaaaacttatgtgtccctacataaagtatcatttaactgataacttttttggacattaggttattattatttttagttgctgttatcaagcatcttcgacatagaatgtagacatttgtatgtaaaattatgttcgagaataaacagatttcatggcctatttgtattactatataggtttccaaaataaaatattctgataaataacaagagtttactaaatgtttattcagtatcttataatcttactgttaagcatttaattctgaccatttatatttccttgatggtacttttttgtgactatatggtaaggcatggcacatggtataatattaccagatggttaataatgtatgtattatttaaaatgtgtgatacaagggtgtgatatttattacctgtgcctttcatgctgtgttttcagagaagagagtttcttaaaactgtaatgcaattgcaactgtattattttttgttttcaagatctcttagccagccttggctaagctgtataattataataatgcattggctagggaatattctaggatgggatctactttataatgaggcccactgtattaaaatacatctttgtgaaccctgccaggttagattgcatcatacctctggaaagtggtattctcactaaggtaagaaggtgtgtgtgtgcacagtaaattttagctgttgctattaatacttgtctaggtatatgcaaagatttcctttggagggggaagctatgaagtggcttggctgtcttcagcatggctgtgttccttcctttctgaacccatttctttttcctgacttaacaccttcctttaggcatccattcacccttttatttaaaaagagttatcttgtatcagttgcttatatatgctggcaatctattttaagtcgaccaaaaggaatgttggactggacacttggattatggaatgtcttaaatgtaattgcagatttgatttaattgtgtttggaggccagaaagattacagtagtacagcagacgagagcaatcagactctgcttgtttttctctccaccgttttacgatcaggacaaatagtctaatggcagctgaaaagccatgttctcagtgacaaagaagaaagtccgtgttgctttcactgtgctctggtgttttctaaggcttgttacctaccaagtcacacaatggagccgagcgcctgctcattcttctttcccctttatctccaatcataaacgtgttttctcctttagagctgcagaaatgtgttttgtttcgttgacaacttaatattgatttaagtgagtacttcgtgaacctcttgccataatccccttcgttttagaaatcttgtttgctcctattcctggattcctgttaggataagcctttttgtcagcagctcttgctagattttgccttcctcaaaagttaaattgtttgcagtcccgtattctttcctcttgcccagttcacctatgctggttcttctggaaagccccagttatagatcgttacagaacttcggaattcagaagaagtgggcctgtcggaagctttttctagttgttgaggtcatgctgtgctttctttaccatagtgctagagatcacttcatgttagtgcatcaaggcatgcatccttgttggctcccacattgcttttttaaacattttgtagatgcaatgacagtcttgaaggcagggaatggttttttgttttttttttttttggtttttttttttcagtctttactaaccaatttgctagcatacttagtgagccatggtagtcttaagcaacttgacagtctatacctaactttaggcagttatttctttctccctctattgttatcttgctttctgtgttttctcttgatctttatttttatttatttgtttgtttgtttacttattttgagacatggattctctgtgtagctctggctggcctcaaactcagagctccccctgcctctgcttcccaaatgctgggactaaaggtgtgcattaccaccgcccggctttctcttgatctttagttagtaagtaagtaagtaagtagataattgttgttgttacttccaatatcaagactattgactatgtagtatcaagaaattgatgccaagtaattttaccttcctccctgggccctgtgattgccttatacagaatgtaaaaattgttctgagctcactaagctttatttcttctgaaagctccgtaatatcaaatcaaacctcattttcattctttttttttttttttttttccgagacagggtttctgtgtgttaaccctggctgtcctgaaactcactctggcctcgagctcagaaatcctcctgcctctgcctcccaagtgctgggattaaaggcgtgcgccaccactgcccctcagtttcattcttactatgcagctagttattgacagcacttctggggaagatgtaccatagtacgatggtttcccagtaactccagtgctacactggctgaccagtgggccctggggatccttttgtctctgccttccagctttggcagatgctaggaatccaaactcaggtctttgtgattggcaaaaggaattttacctcttgttgagcccgctccccagccccggagttactttaataagttcttgatggtacagtttttgataatgtataaggaatttaatattcatttttaaagtatcctattttctatgaaggccacatagttgtttttataactcttttggtggtgttaaaagtactatcttgctgggtatgatgatggtgcataccttcaatcgcagtcctcaggagttggggcaggtagatctccgtaagtttaaggccatcctggtctacacagtaagttgcagaacagccagggctatatagagtgatcctgcttcaaacaaagcaaaacaaaaatactattttaattacttccaagtaactaattggtttcagcttttgtttctctgtggggtgaaggggtagggagctagaggagtgaggaggcagggaaccctgggctctgtatgtcataggcacaatctgccatgagctgtacccacattctcattcccccagcatattactctccttccagagctcatcaggtagggaacagaatataattcagagaattcaggaggccttacacaggggtattctaagctgttggaagtatccatttctcttcgtttttatgtgattgcctatatttcatccatagagtcttcctacacatggcttctcatattagcagaaagttatacaattgcaacagtttctttatatgaatacataattcattcacagcaagctttttgctggcacctcttgatcttcccccacgcctccgtatgctgtgcgctgcacttctgttagtccaagtgtggcttagaagactgccgtgggaataaagtgaggtaataaatatgtaaaactgtcactagtattttttctgctgatttgcaagacaaaaggtacatataattaagacgtttcttccagaaatctttgttgtatatgtttgttttaaatgaaatccagcaatagacaacttaggctctagttatgaaattttgacagtccttaggattgatctaaaactgagtgatgactacattctgttaatgttgtcttgaaactatctttgaatccaagaaatacaaagtggcaacatattattgacttactggataaacaattcaaggataagaggattaatgcgatagtacaaggtctaactatgtttttatgggtgataaactgactgtgctttggcattttaaaaactttgatgtaatagctttgctggcacctaaaactacattgctgacttttgcattgagttatttcatagaaaaaaattcttatattcagtaaatacttgagagcctacaatatgtcaggtaatacttttgaaattaggaatgtatttcaaaacaaaaatctgtatcctttatgtagtttttttctgacagagaggcacatgttaggatttgtgggacaacaaataagctcataagtagacaaaaaggaaatctgtagtctggctgtggtagcacacacctgtaatcagttctgatgctcaggaggtggaaggaagaggatcaggtgttgaaggctatccttggcaactctaggcagtttgaaaccagctggttctacgtgagactgtttcaaaaaacaaaatgaaacaaagccaaaaacctgtccaagaaacaaaagtatttctttaaaaattatttttgatgtattttatgtacatgagtgttttgcctgcgtgtatgtatgtgcacactgtatgagtctggtgctaatagggatcagaagatgtgttggatcccttgggactagagttacggatgattctgagcttctgtgtgggtgctgggaatcaaacctatgtctctgtaagacacaaaagagcaacaaaaattcttaaccactgagctgacaccccagaccctctttttaaaactgtttagagtctcactatgtaattaattaaggctattttagaatgtgtgctctgaacccaagctgtccttgaacttaagatagtcctgcctcagcctcttgagtactggagctaaagacatgcaccatcatgcctagcttcaaagaggaagttatacagtatgtttgaagatactaagttcagtggaaaatttcaaggaaagcagagtaggcctgggaaggtggactgaggtttaaaacaagggagagcaaggcagacctcagttgtagaaggtggcattcgaacaagagttgggagaaagaatgagagtgcattcctgtagaactaacacacttgtgtgaagaatgtaccttgcttatttaagaaatagtaagaggccagagttactggaataactcaaaagaattgaaagccagtgggagatgaaattccagagggcttgggggcatggcccaaagactgttgtaaaggagttttaacattttaaaggaaaaggaaagccctatttaagtttcagtagccagagctaagtgatctgatcgaacaggtttgtgtgtttatttgttcatatgtgcatgcacatttgtatgtgtatgcacacatgtgtgttcatgtatgcatgtggaagctggaggttgatgtcagctgtcttcctcaattctgtccaccttattttttttttttgagagaaggtctcttagtgaatctggaacttagtcatttggctagactgtttagccagcaagtgtcaggaatcctctctattacagggagatttcattatggacagtattggctgtctaaactgggcaagtactttgccaacaagccccagttcttctcacatcttgataggaatgctttggttacagtatagagaatagactaacagacaaggtaagagaactatggaggacagagtcgtatcaggagagcagataaaggggtcagattttgaatggtttgaaagtagctcaaatctgatgtgttttaccctgcccccagtaacagtggtggtgatttaacccaaggcttcacatattctagcagaaattgtaccactgcaccacatcataagcccttgggtttgttgatagactgaatgtaaaatgctggggggaaaaggagagagagatgtcaatgggaaagagaagacccaggtcaggaattcattgtgtgggatgctaagttagaggcagatagcaaatgctgtctaagattttgtataagtaattagatttgtgactctggagttgaaacgaggccctggggcaaatactgttcatgatagccatattttattttctttttcatacacagcaagttagcatttttactttgtagttaggtaggtgtgatggtttgtatatgcttggctcaggaagtggcactattaggaggtgtggccttgttggagtaggtgtgacactgtgggtatgggtttaagaccctcaccctagctgcctggaagtgagtattctcttagcagccttcagatgaagatgtagaactctcgactcctgctgaaccatgcctgcctggatgctgccatgttcccactttgatgatattggactgaacctctgaacctgtaagccagctacaatgaactgttcttataagaggtgccttggtcatgctgtctgttcacatcagtaaaaccctaactaagacagtaggtatgatcaaagaattgggttccagttagtaggatatggacacaactgatgtgtgccatttctagatgtggcacatataaatagcctccattctagctgggtattgatggctcgtgcttttaattaattctagtacttgggaggtagctgcaggcagatctctgtgagttcaagggcagccagggctacacataggaaccctatctcaaaaactttcatttgagaatttaggctgatagaaaacttatcatttttaaaatggcttggaatgaaggtataatagctatcattccagtcccagcaaaggggagggagcatgaaatagaatgaaggatatttgttttgtttttgagatagggtttctgtgtgtagccctggctatggaaatatagaccactttaataactggttgaactatgtattattgttttaaaaaaaacctaggaaatagacttcagtgcattccttttgtgtattatagcagttgtgacacaatcagaggacaatacccgtactctggttctatgccatttaaaccctccatcattcagaattgtaaatcaaataactcttttttactttaaaattattcacctcaagtattttcttatagcacaaaattggttaagagatcaagaactggattgggacaagtgagggaaaatagaatcaagaaattatgtttttaattttaattaattatttttgtttgtttttgttttttgttgtgtctgtcctggaactcaatttgtagacgaggctggccttaaatcctgcctgtctctgcctcctgagtgctgggatcaaagcagtgcccttccacctaattaattttttaaaggtttttgagagaaagaattgttctatggttcaaattgacctcagattcataatcatctttcttcttattgtaggtgttggaattgtatgcatgtgttcccatatagcctcaagcaaaaataaattttgtttggtgatgaaaatcataaagttgtaagaggctagaaaggaaatattagagcaaaacaccaactatttcaggaaggataagaactgctgaagcagtgtttctgtaagggcaaaaagaaaacagggttagtgtataagtaggaaggatggcttcaatacgatcctctaggataaaacaatacctcagagcctttgacagtaatctgctcagggtctgtttggctcgtgtcaggcgtcgtctcagagtagaaagtttcatcccagaggatcctgatgtttcaggggaagtgagtgttacaattcagcgcagcccaggagagaagggagtagaacagatcgtaaagtgggtgcgcagtgttaacctaggagaagctaggcagcactgtggcttcctaacctttgctgtcacatctgcacggttaaatgtaacttgacaagccagtttaaaggctcggtatgagtcactctcattttgactcaaataaaacatgaattattactgcatgaggtatctataactcttctgtcatggctttaagcaaaattgtgagagatttggtgactgatttttctttttacgaaaatttctcttctgggagtggtaatgtacgcctttaattccagtattcaggaagcagatgcaggtggatttctttgagtttaaggttagcctggactatgtagtgagttccaggacagtcaggactacatagagagactctgtctcaaaaatgaaaaaagaaaataaaaaaaaaagaagaaaagaaaaaaagaaatcctatattttatgtagagcagcatccttatcattgcagtttgtcttttatgctgtgcagtgaagcagttccctgtatttttaaaaattatttatttatcctatgtatatgagtacactgtagctgtctttagacacaacagaacagggcaccagatcccattacagatggttgtgagccaccaagtagtcactgggaattgaactcaggacctctagaagagcagccagtgctcttaaccactgagccatctctctagctccctttcctgtacttttttacacttcaaattgtacttggttttgtttacacttttcttattgcccgaaatatgaatcccacctctcccctctctgccctccaaacctccatgcttcagtgacctgccatctactgtaggaagtatccttaatcccctcctaagcctgcccaattaggtgcctttgcggcagcatcctgtatcgttttattcaccatattgcaagtttgtttttatttttgttttcacttatcaccttcctctagactaacacttgtcagtcactgccagactttctataatgttgaaagtgtgctttcttgcccagtggtaagctgctgctcatctgttcattcctttgcctgacagcactgatgcactaaatttatgtaattttcagattagacagtctcgtgtaatgaggagctgttccatcagtgctctgtgagagcattttatttctttgcagttttatttttagatctttaaactaactcactctctttctctctctctctctctctctctctctctctctccctctctctctccctctctctctctgtgtgtgtgtgtgtgtgtgtgtgtgtgtgtgtgtgtgtgttctactgtgtggctgtaaaggtcagaggacaactttatggagttaattccttatgcctttatgtgggttccaggggtttaactcaggatcctaggcttgtgcaccaagtatttacctgatcccaatgctcttaatccaaagagctagcactaatccggggtgtgctagtcttcttctccaaagttctgtctttaactgtagttttccagtttgttctgaattgtgtcgatttatgcagctcttaaattcttctgtaatgattggagttttgtgttgtaagaggttcagcttttattaagtgctctttaccattctaagcctggtgtgtgacacatacctgtaatcttagcaacatgagaaaatttagttaggagaatattaaattttgtaccaacctaggctgtttacagagtaagtttcctacccattctggattatccagcagtcccctttctcaaaacaaaaaggctccttgggttgatagaatattttaatcagttgaggacccaaggacctaagtttgatccccccaaaaaacaatttaaacccatacatgtgaacacacacacactttttcaaaggaccctagcacacttaccagcaatcatgtccaagcagcttataaccacctataactctaggtccagggggtttggcaccctcttctggcctccaaggtaccttcactcaggtacatacacatccaacatatatacatatttaaaaataaacctttttgtaaaagccaggtgtggttgcttgcattcagtcccaaaactgaggaggcagagaaaggtggatccctgagactcactggtcagctagcctgacctacttggcaatctccaggacatgagtgactctgtaccagagaaaaagtgtgagtgatgcctgaggggcctatgcacacatacgaaggagttctttccactttagaaagtctcagaattgatgacagcaccacttacacagtatttgtgactgaaatggtttccatggcagtctgaagttgtgtcaacaaccacagtgattctttgtataagtacaagcaactctcatttatcataatcacctgtacattcttgacttatcttcttaaaaatttatttttgctgtagttcatagtagaattagcattagtagatattactagctcttaaaattgtatccagctaaattatctttgaaataggatttacagcagagattggtttctgtttttataatgatggagtgggctttgtttgttttaggctctgtctctcgtaggccaagcttgccctaaacctactatgtagctatatctatctatatctatatctatatctatatctatatctatatctatatctatatctatatctatatctatatctatagcttacattcttccttttgagtgctacaagcatgtgctaccaccttggtaggaatgttattttaaaagaaaagaaaaagaaggaaaaatatgaagatctgaaaagatagcaagaaatttgctctgccaaaatctaggaaaaagcaccccttccaccccccaataagtagctggaatcgcttttgtcttaagggcagtgtgctggttagttattgtcagcttaagctactcaagtgagaaaatgctctcatcggattgacttataggtaagtcgggggggggggcgcattttcttgattgatgtttgatgtgggagggtgcagcccactgtaggacagatggtcctggggtatataacaaaataaagtgagcaagccaggaggaacaagcaagtaagcagcattgcttcatggcctcttctttagttcctgtctccaggttcctgcctagagttcctactttgtttcccctggtgatgagctataatgtgtgaacaaaattctttcctcccaaattgctcttgcagtagaataggcagtgtgcatgttttagctttggtgtcagtggacttcataaattgaagagtacaaaagtcaacacctaaagcttatattaagtgagagtcaaagacagtttcttttaggtaggaccctgaggattccttcattaggtttgcctttgaagtagaactaaattatctactaagtcccacatttcagaaatgtgagactctagagaagcttgattagaacagaggaatcaaaaggaaagtaaaaaaaaaaaattgtgactattggtttttccttcatattgacttttagagcagtttttgtttgttgtttggtgtgtgtgcgcgcgcgcgtgcgtctttgcatgcatggtatttggtctgagtggtcctgtagctcagaagctctttatcctagttcctagttgcagagatagtactcgtccaagctttggtggaagaaaagggaagtcacctgtggagaaaggcccgcccttactagggaattgttactaataatttttctttttaaatttacttattatttatttttaatcttctgtatatgtttgtgggtctgaaatgtgatacatgtgatgcataccgtgtgtatatgagtgcttacagaggccagaagcctatatcagatgccctgggactgaagttacacacagtgaccttctcctacccatgtgggtggtggatattggaaactaaactaggaacctctctgcaggagcagcaagtgaataagctaatacattgttaaaagtaaccaagaacagttttaaaagaattaagcaaaattgcacgtaagaaaacacatattctgagtcaaaaaaggtcttattacagtataatttaagatttatgtaattctccttgaatatatacctaaaggtaattaaaacaagacaaggcagtgttcactgtgtagccctggtgttctggagcatgctgtgtagaccaggctggacttgaactcaagatgcccacctccctttgcctcccgagtgctagggttggaagtgtgcaccaccacacctgactccctcaaagtaaactctgaaaagaaaaaacactaataaaaaagcatggattcaaatgccagcgaatatggcagttaccaaatttaaaacaattgctgattcattttaaaatgaagataaactataaaaatggcttcatatatttttagaaaaaaaatagaaattctggagatgaaaattatcatgtatcaaatacatgagaagcttaacagattatttttgggtgaagaagtggttgcttagaagataaagctgaagaaatatcaaattaagcctacagtcaaaaagattgaaaatgctgaagagagcataaaagataagaagattgggaggtgggttggagtctaacattcagtcagtgttccagagtaaaatattgcaaagttaatatttgaagagtgggttctgagtgaaaattttctagctctagtaaaaaccagctgacaggtgtaagaaatgcactgaatttttaacagtataagaaaaaacaagtctatacccagacagatcatatagtaaaacaaggagaaatcctgaaagcagtcaaagaacagaaagacgtcctttaaagaagcaactctggggccagggcagtggctcagcaagcacaggcacttggtatggagcctgaattgagagaaggaaaagaacagactcttcactgagctctgacctccacatccacggcatggcagcatacgaatccatctacacacagacgataaataaacataatgaaaacattttaaatcgaagcaactatgagcaagcaattgtcaatttagaattggtaaatatcaggagtacaaatgtagttcaacgaatcatcagccctttgaaattatgaagtacataattaaagtaaaaagtctgagatgcaaggtggagtgaagagcaaagaggagcatgcataagtgataattgcataaagcactaaagacccttaatggagatatacaaataaaggcagtgttctaagacttttatttgggagaaatagcaggttttccagagtgactacctctagtcaaagttgaactgtgcattggggatcttgtccttttgtaggaccaaacaaaccatgaaacaaacaaacataagaactggaagggtagtgaagcctagcatgggctcagtcctggcaccacagaagatggggaggaaaggaaatagtgtggtgtctgcccaagtgaagatcagaggtggagggagtatcaggggttttccatagcatttgtatcaagtgaattaatagtaagacaatttctttgttatatttgtactgttgacacagatacctccaaatatggaacacaagtatgctttctttaatttatgtctccagttctactaatttagtcttctagaatatcacagaacaatctttctcttctaatttcttatttttgtactctcattatttagtaggtaggcacacaagcaaatctttagatatgccttgacactggtaacttgagtttgccttcatgtgtatatgtatccaggtcaccccaactccaaactaaaaatacctctgcttgactttgctcctatccttttttttttttttttttttttaaataaccacagaactgaagatgttgtacatgccaggcatggcctctcttgctgcttttgtcatctgtttctgattacttactacctgcgcttacagagttctcacttagaacttacttcttgacagtctctgtgtttcctaccactttgttcttttaaccatcaggctacatgtgcactgtaatgagtatctgcctgcgttttctgtatttcttggtcttagttatttgagtgtttcactaacatcacaaagtcagcaattcagttctagacccagttatctttgcctttaagttgaatgaatctccctgtgtcctagcaaacttatcacttagtagaatttacgctggatgctgcatagtaagtttctctgttctgcggtcctgatttcactatagagtaagcacccaaaccctttgactcaccatctgccctgatgcttctattttattcatctcaatcactctagtttaagccctgattatttttctcttaagacccttttatttttgttttgcccatagtttacttctattttttgatccattatacctattttctggtcagtcttaagctttagctattaaagcttaaggaatttagtaacatagtaacaaacaccctgttgtttacaaattaaacaaaatgtattcaccttcattcactccgcaaactttcctgatctaataatcacagtcccgtctgtctttgttcgtcttcctgtgttttattctgggacaaaccataagaactttagagttctgagcatgctgagctctcctgtgattgatttactttgtcgttttgtttggtttggtttggattttctagacagggtttctctgtgtattcctggctgttttggaactcactctgtttcaaggctggcttgaaactcagaggttctcctgcctctgcctcccaagtgctgggctcactgcccagctattttctttaggctttgctaatatttttaacacaaggaggactagaagtagagtaattctgcttaaaataaatctttcatagagtattatttggactacagatttgttattgaaagagaagagaatctactgctgaatgctcctcacagtcagctgatcttggggagagagggatgaggctctaaaggatcttgtggacatggattttaaagtgtagcctgtagaatatctgagaggcttataaagagaaaagggaagatgaatacaaaaggcaaatagtatgcagaaaaggttgtggatggactttatatgcttatgtaggggtactgacttgctgggacagtttcctactctaaggagatggctcagcaggtgtactggctggttttgtgtcaacttgacacaagctggagttatcacagagaaaggagcttcaatggaggaaatgcctccatgagatccagctataaggcattttctcaattagtgatcggagggccccttgtgggtggtaccatctctgggctggnnnnnnnnnnnnnnnnnnnnctgctaatatgagaacccatgtgtaggaagactctatggatgaaatataggcaatcacataaaaacgaagagaaatggatacttccaacagcttagaatacccctgtgtaaggcctcctgaattctctgaattatattctgttccctacctgatgagctctggaaggagagtaatatgctgggggaatgagaatgtgggtacagctcatggcagattgtgcctatgacatacagagcccagggttccctgcctcctcactcctctagctccctaccccttcaccccacagagaaacaaaagctgaaaccaattagttacttggaagtaattaaaatagtatttttgttttgctttgtttgaagcaggatcactctatatagccctggctgttctgcaacttactgtgtagaccaggatggccttaaacttacggagatctacctgccccaactcctgaggactgcgattgaaggtatgcaccatcatcatacccagcaagatagtacttttaacaccaccaagagggatgccgggtggtggtggcacgcacctttaatcccagcacttgggaggtagaggcaggcgaatttctgagttcaaggccagcctggtctacaaagtgagtgtcaggtacagccagggctacacagtagaaaccctgtcttgaaaaaaaaaaaaaaaaaaaaagaagggagggagggaggaagcaagcaagcaagcagagcaagccagtaagaaacatctctccatggcctctgcatcaactcctgcttcctgacctgcttgagttccagtcctgacttcctttggtgatcgacagcaatgcggaaagtgtaagctgaataaaccctttcctccccaacttgcttcttgctcatgatgtttgtgcaggaatggaaaccctgactaagacagcaggtaagggcatttttggataccacaaggtggccaaagaccaatttatgagagttgtcttctgacttccactcaaagtaaacaacaatctcagaaccttccaactccattttgttacttaaatattagcttctggtagattaaattttaaaaaggcaaagctgaaagtaaatgttgtataaaattaacagagttggggactgaaggaagagatgactcagcagttaagaatactaattgctcttccagagaacctgggttcaagtctaagcacccaaatggcaactcacaactgtaactccaatcccagagaatccagtgccctcctctggcaccagatatgtatatgatgcacagacatttacgcagacaaaaatgcctgtgcacacgagtcaatcattttatttttaaataagagcataattttatgagctcaagacattcttttggtttgtagtgctggagatagattcttgggccttaagtatgtactgtactgttgaggcatgcttctagcccaataaagaacttttttttttttttttggtttttcgagacagggtttctctgtgtagccctggctgtcctggcactcactttgtagaccaggctggccttgaactcagaaatccgcctgcctctgcctcctgagtgctgggattaaaggcgtgcgccaccacgcccggcaataaagaactttttaaatgatttaaaacctctaccacacacaaaaaaaaaattgatataatgtgaccacattagaaatagagggccagagagatggctcaccaggtaaaagtgcttgttgtgcgagtctagtaacttgaatttgatctctgggactcaggtaaaggtggaaggaaagaccagatgccagaggtgtcttctgacctccacatgcgcactgcagtggatggactgcagtgtatatgcttatccacaccaaaagaaagaaagagaagatagaaacttctctttataaataccttattaaggggcctgagaggtagtttagtgcataaagttcttgccatgtgtggtgttttaaataagaatagcccccattcatgtgtttgaatgctagtccgtagggagtaacactgttaggaggtgtggccttgttgaggaagtgtgtcactgtagaggtgggctttgaggtctcaaatgctcaaactaagactagtgtggcagtctcctgttgctgcctgcagatcaagatgtggaactctccgctccgctcctgtgtctccctatgagccaccatgacgataatggactaaacctcagaaactgtaagccagtcccaattaattaaatgttttccttattaagagtttaataatttaataattcccttcacagcaatagaaactccttttttttttaaagatttatttattttatgtatgtgagtacactgtagctgtacagatgtttgtgagccttcatgtgtttgttgggaattgaatttttaggacctgcttgctctggtcaacccggctccctctggtcaaccctgcttgctcagtccctgcttgctctggcccaaagatttaattatttattattatacataagtacactgtagctgtcttcaggcacaccaaaagaggacatcagatctcattatgggtggttgtgagtcaccatgtggttgctgggatttgaactcagaacctttggaagagcagtcagtgctcttacccgctgagccatctcatcagccctagaaactcttaagacaccatgaggatcagagtttagattcccatcatctctttatataaatgcctaatggacatggcagtttgcctacaattccagcttttgaaaggttggcatggaatctccagaacaagcaggctagctaagtgagcaatattgatgagcaccgagttccattgagaaagattcctgggctggagagatggtgcagcgtttaagaggaaggttgctgaggtcaacctcaggtctctctctatatatacatgtaccaaggtacatatgaacaggcatatatgcaggctcacataccacacacatattcatgcagaaacaacccccaccttattaagagactaaaagacaactgttgtgtccggccagcagaccacaacctgggttctagcctggaaaggcattttggaaacctggaagagaagaggggctaggtggcgagagaaagaaatgcagctaagacaggctttctgatcaaagctcaattttactgttctgcacgcagttatgaaggaaggggaaggggcccgattcccgccaattagtcttggagtccaatagcagggtgaccatgtgcacagctccgaacagcaaagcggcaggttctagcagtgggcatggcagaacgattgagcgggaagctccacccctgagcaagcaggtttcaggctgggggaggggagactacagacaagataagtgaagattcttgcaatccattagttaataagttcttccaaaatttagtagcccctagtattttcaaaacataataaaatagcaaacaggtcacagtttctgtggggcaggaaatcagcaacttaactggcatagctctgactctaggatctcacaaggctagaattaccaaggatgtaatcatttcaagtcttgacctagtgacagtcttctcccatgtttcctgatatggatatagcagactgcagaagacccacttccagatttactcacaagggcctcttcatggcacaacagccagattttcagaagagagtgaaagttttttgtttttaagatttttttaaaattttatgtatgtgcatacactgtctatctcttcagaaacaccagaagaaggcatcggatcccattgtgagccaccttgtggttgctgggaattgaactcaggacctctggaagagcagtcagggctcttaacctctgagtcatctctccagccctaccattgtctttttattgcttaatcttggctgtatcctgttagaagcaggttaataactcttaagcctacactcaagggattcaggtcattaaggacattttggaggattctaccaaacaaaaagaatggactaacatgaaaaatatacattaagaatcagccataggagatcaaggtctagggaagagtaatgacaaaagctagtgagttggaacaaaataaggactcagttatgtaaaaatgccacagtaaaaaagactgaggatacaaatgctcagtggtacagtgcttttcttaacctgtgtgaggtcttgtgttcaggccttaattcttaaaacaagaacaaacaaaaacttagaggaggattgagcctggggagttgggggccagaccctggctcaatgaaagccattactttgtgtgctgacctactaggttttaaagtagctatataattatgcatgagaaaagaaacgtatttactgttttctttgtgctcctagactgcctttatgaagctgggaggtgtgcctgtagagagttgtaaacagacttaccaggagcttgttgagcaaattttctaagttcttccatcacttgagaatgtgtagactagagagactcttcaaggaaacactcagcatgactcagggcatcctacaacttgtcagccaatttgtgtctgttagagagtgttgtctgctgctcagtggcccaaatgcttctggatgccatcagagctggggaggaaatcaggtgctcctaccttcatttggagagggcttaaggggtgagttcccttgctcagccgtttgttgtattgttttctgtttttgaggcagtcatgctttatagccctggatggcctagaacctgtgtagaacacggttgtgagctaccatttgggtgctgggaattgaaactaggttctctcaaaggaagacgtgaccactattttattaaattgtattatattatattatattatattatattatattatatttttaaccactcttaactgctgatccatctctttagccactcttgttcaaccatttaaaaggctaatgaaaatgttcaccaatgagtagcaaattagctatcctaattctaattattacttactattatcttgactagaaagtaaagtaatgttattgaggaaaatcactataaatcactataaaatttttactataaatgtggccaagaggaatgatgcaaactgtaatcccagcccgtggaaagtcgagacttattgggatagtaagacacccccctaatccccactctgaattaatcaaaaatagagaaaagaaaaaagtgcttggggagatgttcagtgggtaaagtgcttgccgttcaagtgtgaggtcctgagtgagtttagttcagtcataccagtgtttgagggtgggggagatagatggatcccaggagcttggggctatctagtgtaactgaaactgagaggttcagtgagagactgtcaaaaacataaggtggagagcaatagaagacacacagctcgatctctggcctccactccaatgcacgagcacataccacacacacacacacacacacacacacacacacatacacacacactacatacacaaaaaattaaaagtggtctttacatcttttcacagctaaaaaacaaaaatcaaaagaaaatgcagtaggtaggtagataggtaggtaggtagataagatagaaggataggacatgaccagtaaacattaggaatgtttttttacttcaggaacaatcaggaaaattaaaacaataagactattttatatagattagatttgtagaaatgaggacatctgacaatatagatattggtgataatatggagaagtaggggtttctttgatttctagtgatagtgttcattagaaaactaacttaggtgacctacaacaagcaatacttcctgtagacagttatcttactccaactgttttcaagcttgaatgtgcataagaattgaaattgttggactccactcctacagtttctgattaaagaggacttgggtggaaactgataatttgctttttaagttcccagttgatgctgatcctgctctcaacccctgaatcctgctttgtgcttcaatcttttccctagagcagtggttctcaaaccttccaatacaagccttcaatataggtcctcatgtggtggtgacctccaaccataaagttattgtgttgccatttcataactaattttgctactgtttaatataaatatctggtaggtgactcccaaaggtacggtgacccacaggttgacaactgctgccttagagaaatgaaagcatatatttaagaaggcttattgaggggctggttaagagcactcagcggttaagagcactgactgctcttccagaggtcccgagttcaattcccagcaaccacgtggtggctcacaaccatctgtaatgggatctgatgccctcttccggtgtgactgaagagaccaatggtgtactcatatacataaaataaatttaaaaattaaaaaaaaaaaggcttattgaggtcaggtggtggtggtggtggtggtggtgcacacttttaatcccagcatttgagaaacagaggcaggtgtagctctgagttggaggccagctggtctatagagtgagttccaggacagccagggctacacagagaaaatcttgtatcaaaaaccaaaaccaccaccactaccaacaaagaaagttgattgctattaaccaccaaatacaaaaattcagacactcattagtagaataaatacatatttgtgtgcttacttagtggtatattatatatttaattacagaatataaagctagttcaagtagattagaaatacaaaacaggaaaaaagcccatggatttgaaagagaatagatgtgttggggtacctgagaggtgttgaagagaggaaagggaagaagggagatgtaattgtattttaatctcaaacaaaaagttaaaacaaaaagatatacaaatcttagtcatctcttgtattagtatgtatgaatctcacaagtatattagtcaggtattagaagatatggtggtgtgggtttgtaatcctaatgatggcaagatgggaggcagagccttaggtgaatgacatctggaactctgagcacttcagatgcttacctgtaccacatgtgcacacctctctcgggaatatcacacacatacatttacaaaaaaccaagatggaattaatgatgttgtttaggaatgcaaatataggtaatagaattataagaaacaaattgtcagaacagtgtgtgatagtaatcaactcatgggaagcaagattgtcaaggccagtttaactgctaacagagggtttgttttatagttatttaaactaacatttttataaacttacgatctcctttttatttccacctctgattacttttaaggtcagatttggttttgtgtatttgttagcctttggatttttttcttttattatttgtggacatcttaggttgagatatctgttttaaaattttattttgaaggaatggtttattgtggacacaatataacttatttgtctttttatttagaattcttttttgtttctttagaaaatttgctccctagtgttacattatgttactatgttgcatctgatgaatttaagtttacaaaaattatgcttttttaaaatttatgcagtcttgtgaagatatgaagctgtctggggacatgtaattatcctaacaccatgtttgcatatgcatatgattttgttctcattgatttgtaaagcacccttgagtatataccagattctgtttgtcttttaatagtgtcatgtccacattactattctttttttatatagtgtcttggtttttgctaataccagcctctttgttgattttgtgcaaatctatactaacttactcttcatgagaccattagaattaagttgtgaagatctacacaagtccttttgggattgttttagattttaatactgtgaagagaaaccatgaccaaggcaactcttataaaggcaaacatgtacttggggctggcttacagtttcagaggttcagtccattatcatcatggtgggaggcatggcagtgtgcaggcagatatggtgctggaggaactgagagttctacatcttgatctgcaggcaccaggagactgtgtcacactgggtgtagcttgagcctaggagacctcaaagcccatgcccactgtaacacacttctccaacaaggccacaccccctaatagtaccactctctttgttttgttttgtttttttaaagatttatttatttattttatgtacataagtacactgtcgctatctgcagacacatcagaagaggtcatcagattctcattacagatggttgtgagccaccatgtggttgctgggaattgaactcaggacctctggaaaagcagttggtgctcttaactgctgagccatctctccagcccagtaccactctctatcagccaagtattcaaatacatgagtctacaagggccatacctattcaagccatcacaaggattttgattgtaattttatatgttcatataggttgatttataactaaaattcagtttcacaactcatgaacatggtctttatctttacttacttaagtgtttggtttttttccttaataggttttacctttctatccagtgctcttcagtttggatgagggtgtagtttttattcttttaaccttttgtgctgttgtgaatgagatgctttaaatacttatttttattatcatttgtatatgtgtgtttatgtgagtttgttatgtgcagatacccaaggctgtgagaatatgtgtcagatcttctggacttagagttataggcagttttcagcagtgggataaagtcacttcctctgaagagcagcaagtgttgttaatcacagagtcatctccagtcttgagataataaataaaaatagataataaatgaatatgaatgaatgagtaaataaaaattaaaaaataggggctggtgagatggctcagcggttaagagcgccgactgctcttccaaaggtcctgagttcaaatcccagcaaccacatggtggctcacaaccatctgtaacgaaatcttatgcccacttctggagtgtctgaagacagctacagtgtacttacacataataaataaataaataaataaataaatattaaaaaaataaagttgtatggaagaagctgttgagtggctagcacttggattttatatctagttctgatacagtgcttagtatttttcaagttcactattacattgcagctacagtgtacttacacataataaataaataaataaataaataaatatttaaaaaattaagttgtatggaagaagctgttgagtggctagcgcttggattttatatctagttctgatacagtgcttagtatttttcaagttcactattacattgccaggattttaaaataacatttacatgtacaagtaatggttgttttatgtagttattattattctaatacattagctagggccttccatatatagtcataaatgatggtggtcatctttgtttttcttttcttagaaatgtatctttgggctggagagatgatggctcagtgattaagagtactggttgctcttctagaggacttgggttcgattcccagtacccatatggcagctcacaactgtctgtaactccagttccaggggctccatcacaccaggcatgcatgtggggcacataactgtacatgcaggcaaaatattcatacatgtaaaataaatatttttaaaaattgtattcttagtgactttttgtaaatttcttatagatattctatgtgaagttttagactgtttcttgatttgtagtctgctatgcagttcttctgaatcatcatatgagtattgaaattttctataccacccattatactgaggtgatcatatcacctgttgatgtaagtcatttcattattaggcatcctatttttgactaactcttggattactggatatattttattgcactgtttttaacttattttgaaagagagaaagctcatgcagaaaagagaagggaaaaagtgaaaagactaaaatgtccggattatatattaaaaagcctcaaggtgatggaaggacagcccagtccctgggctggaatatcattgttgtagatatgatattccaggtggggactgagatgcttggagaacctggaggccaggtatgtaagatatgcaactcagctgtatgttcctttgtttcttgatttgtagtctgctatgcagttcttctgaatcatcatatgagtattgaaattttctataccacccattatactgaggtgatcatatcacctgttgatgtaagtcatttcattattaggcatcctatttttgactaactcttggattactggatatattttattgcactgtttttaacttattttgaaagagagaaagctcatgcagaagcagaaaagagaagggaaaaagtgaaaagactaaaatgtccggattatatattaaaaagcctcaaggtgatggaaggacagcccagtccctgggctggaatatcattgttgtagatatgatattccaggtggggactgagatgcttggagaacctggaggccaggtatgtaagatatgcaactcagctgtatgttcctttgttccagggtctgaaacccaacaattagagctgataagtctttcagatctatctatatcttgtatagttttattctagactagagaaatgtttctctgtctgtctgtctgtctctctctctaagattgagtgtcactatattggtctgtctgtctgtctgtcctggaactcagtatgtagaccagcctggtcttaaactcacagaaatgttcctcctcctgcattctccaactttatatttcttgactgttcagtgggctttaaaagtaacctctgagactacacctttctttcaactctttatgatgatttttagtatagattttcccccaaggcatatttttatgtgcatgtgtgcgtgcattcgagacagacagacagacagacagagacaaaaatacagagtgcacgtgtgcacgaatttgccagaaggcaggcacattatgatacagaggcagtggaggagcactgcttaatggcttgctcagcttgctttgttataatgtccaggactgccaacccagaaggggcagtaccacagtgaactgggccctcccacatcaatcaagaatatgtactataggcttgcccatatgccagtatggcaggagtgttttcgcagttgaggttcctcttccagaatgactctagctctagcttgtgtccagttaacagaaaagtacaggcagttgtgagtcccgtagtggtggcactaggaaccaaacaagtcttggaaaagcaataagtgctcctaactgccaagccatcccaccagccccaaattaaagagaagaaaaggtgtgtgtgtttgtgtgtgtgtgtgtgtgtgtgtgtgtgtgtgtttgagagagagagagagatcacatgctatgacacattgacacatacttgaaggtcaaaaggattacttgactagcaaatatggtttcttcttccactatgtgcgttccagggattaaacccaagtcatcaaagttttgcaaagagtgactttacgtgcagagtcttttgaaatagctttcttctgcttccaatggttttgggccaaggcgtttattcagaaggatgatgagtccacccaaggaagagataggtgaggcttctcgtgaatgggactttagatagagacttgtttaatgatttgatacttattttcagtctactcagctgacttaatttcttttctgttattttcagcatttattcttacttactaaggaacaggtcaccaccagaactgtactcttccatcctgttctgccaaccctgagtctttaattcagtgtttcctaaggtggttctgggcctacagggaagcatttgaaatgtttgattgtcatgaattggagctgctacaggagtcagggagtgccatgcactggcactctttcatggcaagagttacccacttcaaagtgctgcttacggtctctatgaagaaccttaaacattgaactcaaattttttcttgacatctatcatccatctatttttgaggcaaggttttactttatagcctagtctgacttcgagctcatgatctctgcctcagtcttgagaggtctgggattggaggcctatgccaccatatcagacttctgaatttattaacttttaaaaatgatgttgtgtctgtgggtacattactgtgtgtgggtggggtcaagccatgatatgcatgtggaagtcagacgacagcgttgtagaattagttcactcttttcacctttctgttggtcccagagattgaactcaggtccccagactttcacagcaagagcctttactctttgagctgtctggccagccccattaacgtcatatttattctttaaagtttagttctggggcagtgaggtggctcgttgggccaagtcacttgctgccaagcctgacaacctgagttcagtctctgggtccagaaagagaaaacagactctggaaatgtgtcctctgattcccccccccacacacacaaaataataaataaataataaataaacaaatgtaaataatgatagtaaaatagtaactatttagttctagccagtcatgatggcatgcgtctgtgatctcagcactcagaatgcagaggctagcagatctctgagttttgaggctggcatggtttacataacaagttctagctagtcaggactacaaaatgaaatcccgttttaaaaaagcaaaaacaacaacaaaaacactttgattatcttttccagatgtattaatcttttggtctcttctcctccccttccccttctcccgccccacattcttcctgtttgcttggtacatcctaacatttttatgtacatctctattacttgaagtaactatcttgtagtgttcttgattaagacactatacctgtaccttactgtgagctcaaatcattgaggcagagacattttgtattcttggtccatggtatatgtaattttttttctttttaaataatgtatcctacaaataagtcatatatatatgcatatatacatatatatatacatacatacatacatacatatatatatatatataaagagtacactgtagctgtcttcagacataccaaaagagggcattggatctcattacagatggttgtgaatcaccatgtggtttctgggatttgaactcaggacctctggaagatcagtcagtgctcttaaccactgagccatctctccagcccccgaggtgtagctcttaaaagccctgctttcttagagtccattaataatcttgtacaggtatagttgtgggaaataatgaaggactcactttacacacacactgtattatttactttcctcattgttgttatttaaatgcctaacagaagcaatttaaggctgggatatagtagtgcatgccttcagtcccaacacttgggaggtaaagaaaggcacacatctctgagttcaaggacaacatgatctacatagtgagttccaggacagccagggctatattgagataccctatctcaacatcatcaacaacaacaacaaaacaccaaataaataaataaacaaaacccccaaaacaaaccacagaatcaacttaagaaaaggttttattttggctcacagtttgggcaacagtcctcctggagcaggcttggtggcaggagcttgagggaactggtctcattgcatatgtggtcagcatgtagagaccaagaaatgctggaactcagctttctttctcctttttactccaggttcctttttgattattccacaaatcaacattctatggccttagccccttgatgcttacaagaagacagcaagcacatttttaaaaaccaaggcaaatgaatacggagatctacttgtctttgtaagcagagacaataagctagctgggtgggatctggctctgagatcaccattcctgctacatctggggctaaactagctctgttctaggctgaccttgagttcaggagtctgcctgcctttgtaagcacaaatgaaaaaaaccgtacctgggtgggatctttgtctgtgatcaccacttcccaaattgctttatctccttccttaatatctttctgacaagctcactcatagtgcagctgcccattttcttttaggtccatatatatcccctcatatagccaatattgcatgcttatattgtgcataggtgagaaattatacattcttgaactcatgttttcaaagttctttctcactatcctgaaggtcacagcacttatcgttttgctaaggacatagacatatcctcaccttccagactagtgctgtctctgattattatggagtcattaatcttggcaggagaacacctcctgaggaaggagcataaagaaattatgtacattattatgcaaacaagtttcatccctggcaacccatgaacactcctggaggcccatgccctgctggctctgttccaggggcaaaccatgtcactctgtaccttttaggccatgccagactcagcatcatagagctgcagaaatcctttaatacccagaaatgttttacagtgataatgtgttggcttcattttattgttagtcagattgaggaattgagtgcttaattcagttgtatttcagtttttaacttattttctgataaatactgagaatctctcaaatgagctctatgaatgtgttatgcatgtaacacatgaataaagattgatatgtcaaaaaaccttagaggagggtcagtggaaactggatgatgcgacagactaacttctccagggtcatacagctaagtgacaaaactggaattagaggtttatagcctgtgtacttatataccaaatactaagcttttctcaacaagtcttgagaggtagataatataaattctgttttgtgggtgaagtttgttttaaagcatatacaactggcctggggcaccctgcctcttgaccatatgttcatgtttctctgatactaaccccaagtgaggtttaaactatttgaagaagctgtggtttatttgtgtaatcaactgtaaaaaactgattcttcttaatggtttatatcggtccaaatactaaagaatttatttagccagctaacatctctgcaaaaagagtatctcaacttgagaatatacccattatgtagatcacaactttgaccattacattgtaatctattgttggagccataatatttaaaaagaaattttttgctctttgaattgaaattgacctaatcaggttatgttggttgtccaacggaaaatatattttgctattaggttaaatgtcagtcatatttaatggaaaatcattgaccttaagaatttagaatgttcattttacagttttaatgttttatgtgtaaggtctgtgtttgctttttttttttttttcttcattttgttttggattttgagacagggtttctctgtgtagacctgcctatcctgtagctttgtagaccaggctgacctcgaactccgagatcacctgcctttgcctcccaagtgctgggattgaaggtgtgcgccgccatgcttgacttctgtttacattttttactgtgatctgatttaatttatcagccaccagacataactgactggcggaaggggcttcttttacattcacatgagtggcgggcttatgaggatttattttgaggttgggattagaatttctcttaatagtctcagtcatctaagtgcagagctggaggactacacaaaatgattcttcagtccccctttggaatacttgcttgctctctgaaccttggcgcatctttggtgcattacaagtttgtaagagtattaaatctatccacagaagttcagactcttcctatgctttttgctgcttattgtagtgtgctttaatgcacttgcctcccttgtgtacctttatgacctatgagttaatctaagcattattgtcagagtaaacagtataaaatataatcctgaccagatcaaaagccacttcataacagtaaaagattgaattaatatttttattgaatgtgcttgtgcttacatgtggtctctgcaataagatggccataaaacacattacaaaaaaatatacatatacacatatggtttcgaaattgtgatacattccaaaagcgagcttaatgaagattcagtaaagattgagagaaggccctcttaggaagccggagttaattaattaatttatttatttatttattgcttaatttggaaagctgctgagggaagaatgttcagggataaggaatagaatgtatgaattgtgtggggtaagagatgaagggaccagtgcctgatgagacagaatgaaacaatcttgtaggtaagaagtatggggatctaaactctgtaagcaagggaagtaaagtggtgagatgtgttctagggattcccttctgaccagacaatggaggaacgatagcatggaactaagactaaagaaatggggcaattgatacctttgtaagtattttagagagagaaatgataatagggttttttgttttaaactaatcaaggcatgaatcaaggtaacccaggaaatgattggttgtctcaattaaaaaagaaatctagattagaataagtagtgctggggagatagcccagtgatttagcatagtagttgctttgtcagttcctagcacccacatcagatggtttacattgcctgtacctccagttccagttctacacgcatacatgaaggcacacgtacatatggataaaaagaataaactctaaaaatttagtcacatagctcttttccccacatgtatgtgtgtaccacttgaatgcttggtgcacaaggaggccagaagagggggttggattcctggaattggagttacaggtagttgttagctgtcatgtggattctggaatcaaacccaggtcttctagaagagcagctgatgctcttaactgctaagcaaactctcaaaacaaaatctttttttcagacaagatttggaagtcagatgtggtggcacatgcctttcatactagcacacaagcagagacaggtctgcctgtctctattagtttgaggtctgcctgatctatatatacagcaagttccaagccagtcaaagctacaaacagacaaacaaacaacaacaacaaaacataaaaaaataagaaccaaagaagggccagaaaattgaatatagttgttttagatatttgctatttggttctttaaatttttcaattgtatgaattttgggtgttgttggttatataaagcatattgtttttatctttatttacattgcaagaaaaaaaaagaatatgtaatgtacagaatattttgacttaggaaactttgatagagatttcactgaatctgtatattgctcttgatagaatggccatgttcataatattaattctaccagtccatggagatctttccacctaattgcttcaacttcttttttcttttctttttttttttttttcttttttgagacagggtttctctgtatagccctggctgttctggaactcactctgtagaccaggctggcctcaaactcagaaatccgcctgcctctgcctcctaagtgctgggattaaagacgtgcaccaccactgcccagctcaacttcttttttcaatgtcaagtttttaatattcaagtctctcacttctttgaatgtcctcattgtctgttgtagtatgctactttcatctctaattttattgctctgagactctcttccccactgttaatttggttagagggtaggtggtctggctaggcaagcactttactccagagctatatcaccccagttatgggtgagggcatctttaggatttctttttaaccttacacttacttacctatggtgtatgtggtggttgtgaggagtggcacacgcatgctatggtgtgtgtgtgtgtgtgtgtgtgtgtgtgtgtgatgcatgagtatagaagcacatgtaccatggtgcttgtgtttggaggtcaggggacaactctcagaagtggcttctcttcttgcactgtgtgatctacagattgaggcattcctcacgactgacttagttagcctctgtggttcaaagagtctgactcaaacagttcattttagacatatttaaacacaggacaattttggaaacagttttctggtgacagttatcacagtaaagcctagagtgtgactatattgaaactcttgcaaaacgtgtctgggacctctctcataaaaatgggttctgttgactgagaaacaacactcaagagtctaggaagaatctggataaatacaacagtctaggggattcgggccctgcaagtagcaacgatcaccaggttactgctacatccattcccagctttctgggcagaaacaggtatagatccctatctcaggaggcccttgtactctggcctttcatttgttctcatcttagaagggttcaaccttcatgtgggtacattgtaagacagctggagttaagctctccaggcacaatatattcttccatttttttggttttggtggttttgtttttcaagacacggtttctctgtattatcttggctatcacttgtagccttggctgtcacttggctggaactcactctgtagaccaggctggccttaaacttactgagttccatctgcctctgcctcccaagtcctgggattaaaggagtgtgccaccaccacctggccagtatcttctttcattaaaaaaataataataataaaagtctactcaagggctggagagatgactcaactgttaagagcactggctgctcttctagaggtcctgagttcaattcccagcgaccacttggtagctcacaaccatttgtaatgagatctgatgccctcttctcgtgtgtctaaagacagctacagtgcacctatacataataaataaataaataaatctttttttttttaaaaatccagtcaagtttatactgaagattaaccatcacaataacaaactcaaaaaaaaaattgctttctggtagggagatccaaatttgatggaagattaaaaatagattttcatgatttattctgtatatgtatgtgtgtgtgtgttttaattatatttaattttgaatgtaggttccacagtatagaaaatataatgtttgtatttctgagtctggcttattttatttaatatagtaattgctagttttgatggtttattctaaatactcaggtgtttgaatctcttatagatagggatgcaatactagatggaaaaaggttagtacagttactataatcataaaccccactcaattgtctaaagccccgagaacactggcagttactgcagtctgttgtctacattaaaatagttttaatccctatgctaagtgatctttatttagattcttttacttttttaggtatggaatatcaagcaaatgattaagttgacacaggaacatatagaggccctattggacaaatttggtggagagcataacccaccatcaatatacctggaggtaagttttgagtattactttatggtaattttgagagaaaaatgtattaaaatgttttatagtcatagttttggttatttagagagcaggattggaaacattggaagaatttactttgtcttttttttttttttttccttagtcttgttttcattcacttgttgcaatctgcatgtattagttttatttggaaaatgtcaaaactgagaggaatgtctcctataaacttcaaaatattgcctgatgggctggtgagatggctcagtgggtaagagcacccgactgctcttccaaaggtccagagttcaaatcccagcaaccacatggtggctcataaccatccgtaacgagatctgatgccctcttctggtatatctgaagacagctacagtgtacttacatataataataaataaatctttaaaaaaaaaaaaattgcctgaattttaaaaaaaattactaaaaagagagaaagaaaaagcacactgttttggtagtcagcagaatgagttaccatcttgggaaatttggatggttttgtaaaatatctttttgagagtaagtttcccagagttgttttctcctttcttatagatagtttataatcttggaatggcccagtactgctcagtcttgctgcttagtgatgccttgagatttgtatcatctgccttgagtgagattataaatctgtagttagccattgttcttaatcctgtgaggcagtaggtactaggtagtcatagataggccttcttgcccttagtttccttctaaaagtcagtcagtccttagcaagcaggctctgtgggctcgacaagactgcttgccacagctttctactgcctttctccagtaacgcttgctcagctataattgcatgatggtatgtgctgttagtcccaggtctgagactttgaggtcaacctgggctacatagtaagttctaatagagacacctaagctacacaatgagactctgtctcaaaaaaaataaaataaaataaaataaaacaaagaccaagtaagcatttggcttcaaatatcagagattttaaaacatggtttgaacaacttgtaactaaaatttctaatttaccaatctacttttttttttaagaattatttatttactttatgagtacactgtagctgtcttcagacacaccagaagagggcatcagatcccaatacagatggttgtgagccaccttgtggttgctgggaagtgaacttaggacttctgaaagatcagtcagtgctcttaactgctgagccatctctccagcccctcaattatttttcaaagaaaaattaagtcttcattattttgtgagaaagttaagtttgtgtttataaaacaaaccttggaactttggaaacaccaactaaactgttcttctcttgtcttcctcatgacttattctggatcacactgctgcttatgctataaaatgtaggactagaattctatctgtactttcagttgtgtggtaggagccaagcaaagaagtaagaagtagtcttagtatagtcttaatgaaagtgctcatttttgtttatcaaccatacaacagaagcaacagtttgtctctgtctattgggcactttcccacatttgaatcaatgaacatgttatttatagtcatgatggattgtttcagccagacacatactcttcagacatttgaatacttaaaaattgattagtaaaaagaaaaacatttgtgcttattcttattctatgccctgtactgtgttaaatgcttttattaatacttacaattacttttagcaaattcctgcataggtattttatttctctttgacaggctaaatagagaggttaagtaacttacttcaagtggtaggtaactattgctgaagggagaaggcagatatctagcttacaaatctatgatactgaccactgccttattctacagctttgctatcctgttgtgtctctgccctcgtgctaaacatttctaatttctttatctattttttgttgtacaaaatgtggacttttttttcaaatgtatttaattggattggtttctttttacaactatgcatacaaacttgaatcatatattcaaaaacagtgtaacatcaaagcaaagtttaatgggttttaagtatgtgacaaagtaatagattccatatgtactaatgacatatagctatagtgaatatttatgaaacatttagaaaaaaattaggatagtattatatgtaatagtttaagaactattttatagttacaaaatagcatagttcctgagatatgctaaggttctacagataggggtactcactgaataccctgtaatatttatactgtttgcagtgatatttaaaaaaaaaaatgtgccgggtgtggtagtgcacacctttaatcccagcactcaggaggcagaggcagatgaatttctgagttcgaggccagtctggtctacagagtgagttccaggacagccagggctatacagagaaatcctgtctcaaaaaacaacaacaacaaaatgtttaagagccaaaaatctgtatcttcaaacagattgtgcttcagagcagggagggacttatagacaatgaccatataaagcacttagaatattattaatattaattagcatttgatacaccatgaagaagactgacggatgacaggatgcttgcttgtggaaagctagctgaccatcccaagggaaaagactcagggactaaactttgaaggccttcagtcaaaagccagttcattctcctgatgactcccaaggtgtgccattcttcagggttttaggttcactctttaagaacagttttttcctagaataaaagatacattgaatttaccactttaaaaaataaatatttagggttggagagatagctctgcagttaagagcactggctgctcttccagaggccctgagtttaattcccagcaaccacatggttttaccatctgtaatggataccctcttttgatgtgtctgaagacagtgacagtgtactcatatacatagaataaataaatttaaaatgaataaataattttttagcaaattcattttattttgaaaccatcaacacagtccagaacttttcatcatttaagactgatcttttaggccgggcgtggtggcgcacacctttaattccagcacttgggaggcagaggcaggcggatttctgagttcgaagccagcctggtctacagagtgagttccaggacagccagggctatacagagaaaccctgtctagaaaaaccaaaaaaaaaaaaaaaaaaaaaaaaaaaaaggactgatctttttactttacatattaactaccagatccacattttcttctgattatgatctgtaataacaactacatactcctgtgtctgtgaatttgactgttttaaaagaatcacatcatttgtccttttgtgactggtttattttacttagcatgttttcaagaactatacatgttgcaacatggataacacgtgtgtaaaaagtcccttgcttgctagggggaatctcgtggtagaatgtttgcctatttttggctgcttgaattgcaaaaaatgatgaatggccatgggtgaaagataattgaattcttgctttcaaattttaaaacaagggttttttgttgttttgtttgtttgcttgtttgttttcccgagacaggatttctctgtatagccctggctgtcctggaactcactctgtagaccaggttggcctcaaattcagaaatccacctgcctctgcctcccgagtgctgggattaaaggcatgcgccactactgcctggctttaaaacaagttttaaaattatatttgtaaactttctgcacacatgcatgtgcgtgcacatacacataccacagtgcacatgtggaagttaataaacaactgggaggagtcagttctcaggtcatcagggttggtggctttaaaatctctcatatttgaagctaatggtaacctgatgatttgtaatgtaggcttatcttctgcataattaactagtgattacagctgagctaacatttatagaaaaggcagaggaagtgtggtgagcagtcgcattgttgatcctgagcaaagtcgggtccttaggcttaaacagctctcatgtctttgaacttatactcagaatcgcagaatcatacagtgattgtttcattatttaaagggactcacacacctttttatactgtgcctacaccatgttacattcttattatcaacgattgcacaaggattcttctctctccgtagcctcactgacactgaacattttctgttttgtctttgacaatccccattttaatgaatgtacagtgatattctattgtggctttgctttgcatttctccagtgactatgacggtgagaccgtttttacattttattgtttatttggacatcctctttggagaaatgtctgttagctctttaatttttaattgaattgcttacattttagttacttaggtgctattttaaagttaattaatttatttttttcatcattcattcattcaattttaaagcatctcgcacgcacttctatagagaagatattcaagttcattgagtataagcaggaaaattaaagaaacagaaaaatcattcattcatatgtgtgggccaaaggacaactttaaagaatttttctctttccaaccatggtgttaaaacctaggttgtcaggacagggtttatattaccattccacaagagcagaatggaggcatagtgacaaaatccaggaccaaagcaaaaccaaaccctaacagtataaaattctatatgatgtttgggacttgagtgtcaaaggagtagatggctcagtcccaccagctttgctgcctgtgacatacatctccctcttgggctgattccactccctatatgcaaccgtcctcggcaggtaggtatctcacagctctgacattgacaacatattggtctctccagtacagttcaggcttcactttcattgcttcacaatttgaaatttatcttgtttgctagtctctggctcactcattaactaccacaatcctaaggaggaaaagatgggtttgcccctgaaaattctgtccaggatttttctgtttctttaattttcctgcttatactcaatgaatttgaatatcttctttgtagaagtgcgagatgctttaaaaattgttcacatatctttgttttatgggcgtgtgcacttatacaaatgtctgtgcataaatatatgccatgtagtgatatatggaaaacaggacacgctgaaggagtcagcgctgtcctttcatcacgtggatccccagcactgttctcggcttgtcgtgcttggtggcacgcacctctgagtgctgagccatcttgctagcttgagatgcttttctccttgtttttgtacctgatatatggtgtatggactaagaagcaaagagaaaaatacggagccagaacttagtattctcttcaaaggcagacctagtcctgatactcagtaggcagaggcaggctgtgagattcagatcagccaggactacataattaaaatcctccctcaaaaaaaaaaaaaaaaggaaaggaaaacaaatgtccctgacatttattatttatagcattcttataatgcatggcagtctttttcatcttgagatgtcaaattagaaacagtccagacacatttcatcaatttctgcaatgaaaagaataccagcatgtagatcagttcattgtatatatctgtgtaaagttaataaagtttcattagataatgagattaaattcagtaagaataagcttaatacttactctttttgtttgtttgtttttgtttttgttttttttgagacagggtttctctgtatagccctggctgtcctggaactctctctgtagaccaggctggcctcgaactcagaaattcgcctgctctgcctcccaagtgctgagattaaagctgtgcaccaccacgcccggcaatacttattcttaatacaggtgttacatacctgtaatcccaggtctctcacagactgaagcaagcaaattctaagctaattcatgcaatttagcaactctgttttaaaatttagaaagaaattaaagggttaagtatagttaagtgagagtgtttagctagactgcacgacattcgcggttcaattactgggacagaaagagggagggatgaacgtaatgactcaggtgcaggagatctgtgaactgtggaagccattaccataaactctcaaacagtattactttcagtattactcaaaagaatttctttatccattagcatctgttccttccagtcctcggaatgactgatcttttgattgatgataatgttggaataataatccataaaatatgggaaagagtacagtatagaccaaagtctgggaagatgttagaaatattcatgttgacctgaaacctattcgtgtgctagtgagatgtaaagtcaaggtggagtagtgttcattcaaggttgtgaacgtcccagagtcagactctggcatcatttcaatcttttgtaaagcctatggtatgaatatctctgggtcttgaagacagaatggaaataaatgcctaaattnnnnnnnnnnnnnnnnnnnnnnnnnnnnnnnnnnnnnnnnnnnnnnnnnnnnnnnnnnnnnnnnnnnnnnnnnnnnnnctaagaaacttgaagaggtaagagtgtatttgccctctgtatcctgaatcacagcccgttgagggaagccaaggcaggaactcaagtgaacaagaatgtggaggcaggagctgatgcagagacacgccatgaaggagtgctgcttactggcttgttcctcatggcctgctcagcctgcttccttttatttttcccccttttattaaaaatagatttatttttcatataatctatcctgataacagtcaccccgccctctactcctcccagatcctccccactttccccctcatctgaagccactccctttctgtctctcagtagaaaacatataggcttctcaaggaataataatataataatataaaacaagaactaacacatcaaaattttaaaaaaaaaacaaaacagacagacagaaagaaaagagcccccaaaaggagaaaaaaaaaaacctaaaaattcagagacccatttattcgaacactaaacccgaagccatgatatatatgcaaaggatcagtacggtaaaaagagagaaaatataaataaaatgaaatacaaatttttaaaaattaagtggtgagggcactgttgctatagagacaaggaacttccagaaaactcagtgctattgaggtttttgttttgcttttgttttctgttgctcatctactgccaggcttgcagcatatccttaagagaagtttgtttccctcaatgaaactcccttgaaaaaacaaaattttcattttcagcctgctctttttatagcatccagtaccaagtcagggggtggcaccacctacaatgggctgggccttgtgcaggaaatattaaaaaagaactggctcgttcccgagattgtgcctgcaactctgccctgtagggctgaccagccatcccccctgggccctctctcacctccccctcctcttcttccgtccagcccggaagtctcccctacttacccagtgattttctcctttactcattaggggataggtgacaagaagtcaccagtatacaagactccattctccctggagagtggaattagcatcaaaatacaagcaacccctgggctatccaccaccgggcacttctatatctattaaggaaatgccctacaggcttgcctataatctgattttaggaaggcattttctcagttgggattccctcctctcagatgactggcttctgtcaagttgacatacagctaacaagtacagcactgaatgcagccgaagtaacttgttaaactgaactgtgagaatgaaaaaaactattgataatgtggtgaagtgatagtttgtaatctgtgctgaagaaattggtatattttcaaaatttaacattaatactttgataagggaagaatatttggaaaattcattgtttccaataattcttttttataaggctaattttatataataaccatgtttgcctaggcctcagtaataagaatatttgatttatgtaagaaagaacttgtctcccaggcatttctaaacctttaagggtaagaattgtctgccttgtctgtttttgtagtctcagcataaacgatgccagtatagagataaacaacgaatatttattgaatgaatatagactcaataaatgaagcatattgagaaaggcacccttattaattagcctcttgatatgaaaactaaacagaaagatttgaattgatttgatggtaactctctattctgttcgtgacagttctagactacgaaattgtcaaaggggaatttttccagagttcaggctccttacctcagtactttcactatattttctcctttcaaaagttgttcaggaaaaaaaaaaaaaaagttgttcagtaagataaatattcagtacaccagagtgctgtagcctttattgaaatgagattgctcttgcattctccccttcctcaggtaattcctgcggtataatttctgcttatgaaatacagatttcctagtgtggtccatatactccttgcactttccaacacattacctgacattcagtttagaaatctgtggggttccccccacccagtaccttaaaatatgttctttgttaaaaaattctctgcacacaggcctctttttaaagtttttattgtgtgttgttttatgttgtactcatgaggctggggcatgcacatgcatgtggaggtcagaagacagctttcagaagttagttctttcctttcattgtgggttctagggatcaaactcaagtttcaggcttgctcagctagcactattacctgctgagccatcttgctagcccagtaaacttcttgagaaaaaggaaatgtcatattataatccttgattctctcttgtagaggttcataaatgtttctagtactgcatctgtttgggatgttagggaacaaaagggctaaattactctaggctgaggtgatttccattgtctgaaagaactgtggatatgtatattccaatcaatgccatctctttactttcagtatcattctgttcctttagaatttggtatttaatatggtaagccattttactttatagcttttgtcaaatgggatgtttaaaagggtatactcctagtggtccagagtttcctatggttgcagggtatcaaatcaatttttacttgcttaagcagcatttgatggggaaggagataataaggaatactgccagagagcatgttgatatccaggatcatagctgttacaggagacagtgatggcatccttggtttgtgctgtccccagaggctgtctggatgtctatgatctatgctgctgctggaaactatgtgaaagtccatgcatgatctatgctgccattgactgctatgggcaaggaagcttctgcagtggtatcaatgactccagactcataactgagaatgagagatgttgaaggcttctgtgacactccctacccacccccctcccccccaaaaaagcagtccagacaaatagctattgaaaagactgcttacaaattgtgataaagatggtgaagtgtagctcatcacagttgatagcttctctcagtggggttgggaaaggactctgtcttttttaggcagctggccagcagagtttgaccatgcttcagtgagtacatgagcaacacaaattggacttggatttttctttctttcttacattcttagttagggttttattgctatgaacagataccgtgaccaaggcaactcttataaggacaacatttagttggggctggcttacaggttcagaggttcagtccattatcatcaatcaaggcaggaacatggcagcatccaggcaggcatggtgcaggagctgagagttctatgtcttcacctgaaagctgctagtagaagactgacctctaagtagttaggatgagggtcttaaaatctctctaacaaggccacacctccaaatagtgccactcactgggctaagcatattcaaaccatgacattccactccctggcccccataggcttgttcaaacacctgagtctatgggggccatatctagtcataacataattaaaaagtacatttagtccaacttccaaagtccccataatctcgagcagcatcaacaatgttaaaagttcaaagtctcttctgagatctatcaaatcacttaactgtaatccccaaatcaatacaggaaaccatctgggtaaactccaaattctgcatctctttgtctgatgtcaaagcagttttcagatctccaactcctttttcatcattgttgactgcaataaacttcttttcctgggctggttccactccctgttagcagctttcctcaggaaatatcctctagctctggggtctccaatgagcaatgttcaggtcccatgtgaatctcctttattttgtaggcctatgaagagtacaccagcaagctagatgcccttcagcaaagagaacagcagcttttggaatccctgggtaatggagcagatttttctgtttctagctctgcatcaatggacaccgttacatcctcctcctcttctagcctttcagtgctaccatcatctctttcagtttttcaaactcccacagatgcatcacggaacaaccccaagtcaccacagaaacctatcgttagagtcttcctgcccaacaaacagaggacagtggtaagtcagtatttatcatcatccttttgctttctttgtgttgaacatcatcatcactgcatattcagagccatgccaatggaattatccattttaagttagggtagaaaagacatgattattttatgtcaagtctatatacagagttcttttttttaagatgcattcattcattcatttgtttgtttgttttatgtatatgagtacactattgctctcttcagtcacaccagaaggcaccagatcccattacaaatggttgtgagccaccatgtggttgctggatattgaactcaggacctcaggaggaacagtcagtgctcttatccgctgagccacctccctaacccttctttttaatttttatttgtgtatttgtgtacatggcttcactatgtagcctcggctgtggaactcactacatagatcaggctggcctctgactaacagcgaccggcctgcctctgcctcttcaagtgatgggatgttagcatgcctaactgatcaaacttcattggcacttaaatataagtactagttaaacatcagtcaggagccaggcagtggtggcacacgcatcccagcacttgggaagaaaagtcagtcaggagactgaagaggtggctcagcagttcagagcactggctgctgctgcagaggtccttggtttggtctcctgcactcttaggttagtccacaaccatctgtaataacattttgaggaaatttggtgccctcttctggcctcaaagaataccaggcatacatatggtgaactactgaacaggcaggcaaagtacgcataagaataaaataaaaacgaatgcatctttttttaaagacgagattagaatttccagatttaagcttgtatcaggtaagattctttcctctgtgtaatctccagcctaaattacctttcagttacctttcagtgtgctagtgttttcctcttgtgtatgtaactcctaaaaattgtcacaaaattgttagaaacaatgtaccagtaagaaacatttaaagcagagaaatctcctgagtcctcaagtaaagcacatattgtcaagttcagccttcataattaacgttcctggaaaacgtaagccatagtgctttcgtgtgtgtgtgtgtgtgtgtgtgtgtgtgtgtgtgtgtgtgtgtgcacaagagtgggggtgctcacaaggccagaggagacattaggtctgcagggactggagttataggtagttagttttgagtcaccggacaagaaagatcctggggactgaactctgtcccgtagaaaagcagcccgtgttcttaaccactggtccatctctccaactctatatgattgcttcgaactttaattagaagagttgcaagtcagctaaaatcaaagtagtttctctttgtttttgctgtgagacaacagaaattcaaagtacagtgggtgttttccagtattccaaaactccttttgacttttaaaaaatgttactataaaagcattttgccctagagtctagaattcctgtgttaatgatcggattaggaactagcagagttgccaactacccacatatttttggattttgaccttacttagaaaatactgtttttggtctgggtgtagtggtgcacgcttttaatcgaagcatttgggaagcattagcaagcagaactctctgtgttcaagaccagcatggtgtaccgggacagccagagctacacaaagaaaaaaccctgtccgggaacaaacaacaaccaaaaaaaaaaaggaaagaagaaaatactgttttctaacactgttaattatcaagagtagatttttacacactttcttcctgccctttcttccaggaagagttgattgtgataaagcaaacttggaattacttaatttttgcacagaataagctcaatttctaaaacaaatccagttttgtcctcttcaaaaaccaggaatgtaatgtaaaattatttgtaaatagctattctatctctgaagcttaaaaagtgagtggacacccacccccatctctgtcttcattttgttgcctatacttgtgagaagagcgtgggccggacagatgacttggtggttagaagtactggctgcctttgcagagaagcccggttctgttctcagcacccacgtggcagcttacagctgtctgaaactccagttccaagggactgaatactgtctctgatctctgtgggcactgcatgcacgcgatgcacttgcatgtgatgacgtacatgcaggcagaacacacagagacacaagatgaaaggagtttaggggattggctacacaatagcatgaagattaaccttgagcagttcacttttaaaaataattaggataagactttgttatgtgtatactttaatacatttttaaagggacagtatggtcataatacacaaagttaaaatatctctaactaagatgacccaaccatctattttgaagtgtttttctgagcatgaaaaataatgatttgttttgttgttctatttctcataactccaagttcctaatgtccgtcaacaagtaaattgttaaattggtcctttgtttacatacctaaaacccagtggtagctcagtgtaacttcaatgccgtcctgatttgtgtatggagttctcggttagttggacttacagaaagagaccccatctcaaaagttttttgttgttgttgtttttgtttgtttttttttaaactaaaaacaaaaagtcagggatatttttgaaaaaaattgtgtagggctttggagatggctcaggagttaagagcactgtcctcttccagaagacccaggttcaattcttagcacccacctggtagctcacaactatctgtaactcctgttctaggggatccaactccctcatacatgcaggcaaaataccagtgttcacaaaataaataaattaaaaaaaaactgtggtatatctatatataaagaacatagtttgatactaaagttactgatagtcctaacacccaacatagatgaatctcaagaaaaatatgctgtagaaaagaaggtagacaaaaatagatgcatactttgtaattccatttatataaatttctaaaatgaattcttggttatatatggtggtgaatacatataatactctcacttaggagatggtggcaagagaattaggggttcagtcatctttggctacatagttaagtctttaaaaacaaaggcaaatttttctatagtgacagaaagatgtttagtatttgtctagaagaggattaaggaaggaaggaggtattacattgaagtacaaggaaacttgcagaaaattatgcatatgttcattattgtaaatattgtaattgttttagttgggatttcaatttctataatgcaacactatgaccaaagcaagttggggagaaatgagcttattctgcttacacttccacatcactgttcatcctcaaagaggtcaaggcagtaacttaaacggtaagaacctggaggcagaagctgatccacaggctatggaaggcttctgcttataggctcgctccccatgacttatttaacgtgctttattacagaactcaggttcaccagcaaggggtggcactgttcacaatttactgagtcctcctaagtcaatcactacataagaaaatgcctacagcccagtcttatggaagcatttcttaatcgaagatccctcctgtcaggtgactctagcttgtgtgacagaaaaagtagccagaacaggatatgtgtggttatgtacggtgcgtattaaactgggttctccacatcactgcagtttatcccttacctcattcttggttttcattgtgaacctttaaaaatgctgctcatcctattctgccttgtttgtttttattttctcttattttattattactattttagatgcttgtttatattctgatgagagagggggttatagatttgatttgggtaggtggagaagtgggaaggagctggaggaggggaactgaaatcagaatatattatatgaaaaaattattttcaataaaaaacaaagaatgctgttagtcatagaaatatatgaaatagattttaaggaaaacaattaaggacaaggagagatatattaaaaagcaacttcaccagacaattagaatactaagtattgtatttaaacagttctttgtcagttatccattttcatttttgatcttttaagatgaggtctgtattctgtgctgatcttgtacttaagatctttctacctctaccccatcaagggctgggatttcaggtttatcccagcatgtaaagcctagatgtcattcttaatatattacaggtaggtcctgtagacatttaaaaaaatatactttttcaggacacttaaagtctttactatatttttagcaataaggaatatccaaaaatgcaaattctctgaacatactgcaattaaaataaaatgaataccaatagaaaagcatggtttagaattgtagttactctcagcatagactaaaaaattctaagggaaattagaaagtatttttatgaataataaaaataatgcataaaattgtagaatatacaaaaagcaatataaaatttgccttttaataatttatatgagtttttgaaacacctaaatatgaatgagaaataagatcaaagtaatgttaacaatcataataaagccctaactactgtacagttatcaatttttaaaattacatgtaataaaggtctgagagagtagctcaggagataaagcatttgttgctcaagcctgagctggaggactggtggtcagagccccagaactcttaaggataacccgcattgtggctacctgtattctcattacccagaagatagaatatggacccctggtgcaagctcaccagctaaactagcaggaatcctcgtgctctctcttttgcaagttacctagcttcaaaaaatcatgtggttagcaattaagaaagagttaatgaactttgggcctctatacaaacatgagcccatgacatgaacatactcatatactgacaccatacacacacacacacacacacacacacacacacacacacacacacacacacactatgactagggctgaggcagtaactcggagggagtacttgctattatattctgggtttgatctccagtagtactagaagtaaataaaagttcataacttgaagtataaaattcagaaacaaaatggattcttgggtttgagagatatatatagctcagtgctagaacttttacctagcatgtgtgaggtcttgggtttgattcttagcaagatacatatatacatgcacacacacacacattttcaaaagcaaataaaaaaagaaatagaaaattgtaataaagtgttgaagaacatgaaggtaagagaaacatctattggggcagagattcaagggagcaagaagggaaactggtgatggtggttatcaggacatatttgtatacttgtatgaaattgtcagaaaataaatatcttttttaaagatggaagaagccttgtagctactgaaagttctctttgtttctgaaacagagatcctggaaattagactgtgacatttgcatcatgacaggcatatgttttatttgatattaacattgttatatgtatgtgaagtcataaaaagtgaaatcccagcaagtaggtagacatgagaaagtatataccattcaagaaagaatgttgtaaaactgtgtcactcaacgggtgagctttttagtggcagtaaattataaaaagataaatatgtaaggaaaattaataaaagatggtttcttctcataaagtacaagttttcctcatgtcataaagctttgagttctccaaggaacaagaacttattgtatcctatcagaatttaccctttatatcagataaagaaaactgtgatgtttctatctgactgttagatgttattgattgtctagtttcttcattttcatgagagtatatagtgtacttggagcatatttctctcacactccacttctcacctggtttgggatgtgtgggtaggtggctttatgttcctgtgtgtgcacatacacatgtaggcatgcatgtggaggcctgaggacatcctgaggtgtgtcaggagtcatttaccttgctttttgagataggctctctcactggcctcgaactcagcatgcagggtaagctggttgcccagtaagccctcaagatccacttttccctgccttcccagtacacatgctgcttcatccaacatgtttgtttgcttgattatgtagaccagactggcctaaagtcacagagatccacctgcctctgcttcctgggtgcttgggattaaaggtatgcaccactgttattcctgactcacatctaacttgcttatatgagttctcaaaattcacctcaagtcatcatgcttgtcaagtaaacactttactaactgagctctctcctcagcccttcaagttttttgaaataggatcttactatgtagtgttttattcagggcaatccttctgtctcaacctctaagtattagaattataggcatgagccaccatgcctggcagaagacttcgtcctaaatcattttgaatttgatagtttttttatggctataataaagaccatggccaaaagcaacttgagaaggaagggtacttccatgtcacagcctaagaaggtcagtgcaggagctcagggaggaacctggagggaagagctgcagcagaggccatggagaaacagtttgctgggttgctctccgtggcttcctcaatctactttcttaatctcatctaggacttgcctgatgtgtcaccacctccagtgaagtaggtcctcccacatcaagcattaatcaagaaaatgctcgcggttcaaggcattgcctcagttaatatttttttcttctcaaatagttctatatcaagttgtcaagaaatcacccagcatgctgctgccaaaaggatttctctgaactccacatgtgtacacatacatgcccactcacaacgcatcatgtgaaatcaaaatatataaataagggaatgtaatttaaaaatgaaatcatgccctacttgtatttatgaagtaagaactgtttgtggagtcgagagaaataagataaagttgttttgattttagccattttgacggtgaggaagtaatagtagaaacttaaattattaccagtacaaataagtaagtgtatgaagtaggttaagaataaaaggatattattaaataggatatattctacagccccaggaaataatcctccctctatatttttagccacagtgtattttgcttaccagttttcagtttataaaccattctcatgtgttctcatttgtccccacagcaagtttgtgagggcaagtgctgagtgcagcactgtggaaccaggacattctaggttccacggaggtgctaataagcctttccagcagtggaagggcttcttttgtccttggcacgttttttaactgattaacctattttggtttgattagcagtttagtagtaagagatacaacctttgtaaatggccctggttctttgcaagttaaattccgtttgtctaggaagtactttaattctaacgtcttcactctgaagtgtttttagggtataagaatcctcttaacaagactgtgttgtaagcatagcatatcatagttttccttaaaaacaaattggtctgacagccgagaaagatacaacttcaagattaattgtcataaaatcacaaagctatgtcttggtcaggcttactattggcgtgatgaaacaccgtgaccagaagtgacttggagagaaaagggtttatttggcttacacttccacagtagtactgctcatcattgaaggcagtcaggacaggaactcaaacagggcaggaacctggaggcaggagttgatacaaagaccatagaggggtgctgctactggcttactcttcatggtttcctctgtcagctttctgacagaacccaggaccaccaatccagggatggcatcactcacaacacactagacctcccccaacaatcactaattaagaaaatgtcttagaggtttgtctacagttcagtcttatagaaagaagcattttttttttccaataaaggttcccttctctaagatgattataccttgtgttaggttggcataaaacgagccagagctagctgtatatttaaaattgtgtccgaatctacatattggtttgcatatgagtcctatgctagtttacttaagagctgtttcgtgtttacatataccacaaacttgcttctgtaccaccaagccgaccacggtgtatgtgatctgaaatgctgggaagcaggaaggacaggagtgcagagtatgggtatgtaagtttaaggccaagctgggctatatgagatcctgtctcgaaaagaaagagaaagagagaatacaatatcacacacatactagcacaaataattcagtgtatgacattttttgatgtccaaccaaatctttttttgggtgggggaggggtttgagacagggtttctctgtatagccctggctgtcctagaactcactctgtagaccaagctggccttgaactcagaaatccacctgcctctgcctcccgagtgctgggattaaaggtgtgtgccaccatgcccagctgtccagccaaatcttaaagtgaatccttaaagttttgtaaaacattgtactatagaagattttaaacacatgcaaaggtagtgaatgacttctcatggatttttaatcaatactcatttcagggttttttaaatttttttataataaagtttgaacataactgttttgttcaagtgtgaattgccctgtggtaaatacatattcagacaaatatatatagtgttgttgactccgtaacatgaactcgtggctaacatccctgtggctgaggcctgaattaagtttccccaacacacacacacacacctccctacctcttccctgccagacacattacagtcttctctgggcttaggagctctaaactgcacttaagtactgtgctgggaaaccatctgaaacagaaagcacataggtttatgtagcagtaggtaggctgggaataggaataggatacagatttgtattctgaaagcagaaaggtaaactgttactttgttcaaccttagctcagacagtacatgaataggtttttcactgatcttcatgtatccataaacacaataaagttttttatattttccagtgagtagacaaatacacacataattcctcacaaataatgagggttgcctatatgtctagctatatcttgaatacttaaaattatgagaccctgttcccttatgacaaacttaagatagggccgcactctgttaacctggctggcctggaactcacagagctaggtcctcctgctttttgcgtcccaagtgcttggattaaaggtgtgcaccatcatacccagcaatagtttcagtgataatattaaactgtgcttatttctaaacacaggtcctacctagtagcttaaagtaattaaagtgactgtagcagtaatcttctattacctaaaacacccctccttctgacttccctaataaaagctgtactccctgtaatctttctgcttctctttagtcttgcaaatttgccaggtagatgaggcatgggaagggctaaacaataggattaaccatttgccttgccctctcctcccagtgttacttctccttatatgagctttgttctatcaatagatagtgatatcttgatattaatgttctaggaaatatgtatcaattggcacactcttaactacactaaaacaggagcatctctcaaccaatgtcatatgtcacttcaaataagactcaggtacaatttagaaggtcatatatctagtcctggacctattgctatcataaggaattagcagctgattaacatgtacatcattgaatactagaaaaagctattgatagccccaatagtaatatgagattctagagaaggtcgagttcccagatagagacactagggaagtaagtatcgaatatcagattgatgcctgtctctgtatgtgtgtgcctgcctgcctcacctgcaccctcacctgtctgtctctctctcttggatggtggtgcatatgcacatgtgtatgtctgtgagtgcatgcacttgtagagatcagagatcaatggcagttgtttttatcactgttcaacttgtttttcgagacagggtctctcttgtgaaccagttggctgaccaaatgacacagccctcccccaggtccacactggagttaaagatgtgcactgctacactcagctttttagtgggtactgaggacccaactcaaatccttatgtttgtacagcaaaagcttcacccactgagcatccatccagccttcccatatagcctaagacacacattttcttctgctatattcagagtccataaggcatctcttaataatcatcagtgtaaccaaggacttattatacagcttgcacctttggtcaaaatagatgtttacatctagacatagtagtgtgtgcttacaagagttgtgaggctgacataggaatatctagagaaccaggcaagcctaggctacaacaggcactgcctcaaaaagcagacagcaacattttttattttactttgagtgttgacctttaagtattttcagtggtggaaccatactatattggtatgtgcaatatagtggatattatgttttctattcatgtatatgtgtatgtagttttaatagaagatgtacacatctttttttttctttgtttcaagctgataaaataatagttacttggtataatttcctttgactaatgagtaaattatagacccaaggaatccatatgatattttaaagatgttataaggtaaatgactcagttttaaaaaatgatttgaaagaaaacctccttcctttacctcttgcatgtatttatgtcataggtacccgcaagatgtggtgttacagttcgagacagtctaaagaaagcactgatgatgagaggtctcatcccagaatgctgtgctgtttacagaattcaggatgggtatggtttgtatgtgttgtgtcattttctttgaaagaaaattagacataaagctctggggttcttttgtagtctttctgcaaatctctggaatggagaattaactcaaggactggagaggtagctcagaacccacatggcagctcatagccatctgtaattccaattccagggatctaaaatcttgttgtctcctcaggtatgcatgaggtgtacagacttaaatgccaggaaaacacccatacacattagaaaaagagagggtatttattactaaaagatttagaacatcaacttaaaaaattgtactaatactactcttgaagaaatcttgaagactattgataatttatttggttttgttgtttattcctatgacaaatgcctttattagagtttataatttccttaatttgtgaacaattaaaacagcagttctcaacctttcataggggttgcctaagaccactgaaaatatagataattatttacagtgtgattcattacagtagaaaattacatttatgagtagcaacataaatgtttttatggatgggggattgccacaatatgaagaactgtattagagggtcacagcattaggaaggttgagaaccactacattagaatgtgatctgtttagataatgtgcatttctatagtcttcctttttaaataccaagctcatagttccacaaaaagttaccaaaatttacattttaatattgaagtgtcttttcataaagtaatattgttccgagatggttatgttttgaatctacatcttgaggcatgttgttccttggatggtctttttctctgaattggatggtaagaccatacctgtgtgtttgtttgtttgtttgtttgtctgttttttaaaccccaggaacaatttggttttgactgttgtaggtttttctggaccgacttaaaagtaaatatatttatactgctctttgtttaaaagtaatacatttattaaagttaaacttaaaaattaagactttaatttctaatgattgaaaagtacagagccaaactttcttaatattagttcctctgtaaccatatttgtatacacacgtatatactgagatacagtaatcaagaaaggtttttgccttcctttttttcagagagaagaaaccaattggctgggacacggacatttcctggcttactggagaggagttacatgttgaagtactggagaatgtcccacttacaacacacaactttgtatgtatctattcatatttgaattgtcaaagctggtcagtttcttttgaatttttttatttagtgaatattaaatacagatgaataattttgtgattgataattggcctaaattctgttctctaaaatcttgtatttgaaaagttaatatttattctttctttataacttaaaaaacatgtactatgtctcttaaatgaacaaataaaaaccaaacaaaattagtctgatatgaaaatctgcctatgaaaatgaacttttcctagaaatcgtcatgtgtatagatgcaggtaacaggatagttctctatgtacacaactccagggcagtgagcacagcgtacttgcttttcccttcattacttcccattcctctctctctttcaggtgaaaactggggtcatgctgtgtgatcgtcttccttttaattttctcctcagtaggatttgcgggtgttaattctatttcagtacggctagctttattcttgtaatgattgcctagtagcctataagaagagaaattgaggctttttctcttatttttatttttataaaatgtaacatgtagagttagactgcctatgtcttgacatacaaattgttcgcaaagattaagggctgggtaggaagcagcagagttgggtattgagttctccttgagactttatcttgtcttttttgcctttggtaaaacctagcttaagtttgtcaccagcccgcaacagcctcctaaccaccccccactcaactaaaacatctttaaatatacttagagtctgttctaaactaagcataagttatggccagaagaaataatagatctttttggttcacctttattcacaagggtatctttatggtttgcataaaatccatctttagtactgcatacccagtaccttttacccttctgctgttctgctcccgtctctcattctcttcctctcccctgccccacccaacccctgtgtacctcgcctgcatgggcgtgtgtgtgtgtgtgtgtgtgtgtgtgtgtgtgtgtgtgtgtgtgttgtttcctgagatagtggtgcagtactaaagatgcttaatttggcaattaaatatcaaagttatttcttatttctgtataaccacaggcaactggaaaaggggaaaggtagaaacaaacatttgccttttttcacatgctttttcaagtgatgggaaaactgaagacagcacaccctgttacgtaaaagttcctgaaagtccagaatgtattatgtgccagactataattctcagtagctattgattaaataaatattttttgaagatagaaatttgagtggggcacagtggcacactgggaagcagagacacacaaatgacggggaattcaaggacagcctagcctggtctacatagtaaggccctgtctcaaaaaaagaaaaagtttgagagcagatgtggctttccatagctggaaacctctattgggaggcagaagcaagaggatggttgaaagttcaagaccaacttctgtcgcaaaaaccatttaaacagaaagagaaatgtgatttggtgttaaaatcaaatgtatcgtgaaaagcatttatacataataaaggatataaaatgctaagctatgcttgatgtaagtgctgttatgtaggttgaggtatatattaggtcataataaaagaatacatttattacttatttgattgtggttttttaaatgaaattcaagatggttgaaaatataaaaaagccatccttgccatcaacattctgaaatagcagtgttagcaggttgtgtgttgttctgcccatacttactgcagcacatacacactttatatcatttctgcctgggggagaaaacgttcccgtcatacactgcaatttctttgatccatgctgtacattaagtcactgataaacttttgatacttttgaacatttatttgttttgttatatgaaggagcttatctgaaagcatagactaaaaaataagttcacatcagacattcttccagaggtgtcctaacaatatgttaaagtctgaaggcagaagttttctttcctattagccaaatttcagacctaaactttgagaagttgctgaatttagcagtaatacatcctgtgttacaaacaattcacttcataattttgtggtcagataaaataatcccaactacaccttaataaaattacaatgtagatttcatgaagccattgataatttttaatagtttctgttttaagctcttgggtaattatttttatattactaaatatcttttgccatgacttcttgttttatcaacttgacacctcgggtggtgattgctgactccattaggagtggcttgttgccagattatagcattctttctcctctcgctgttctgtctgagaactggggttgaataagtagatctttgtgtctcgaactgtcgcactagtggtcacctcccttagcttccttccttgtgtcgggattgagtgatagctttgtttgcattcctttcacctctagctcttctttttgtacttttactttttttatgctgtcaagcttgaaatcagttactctttttaactcaatttttaaaaattttttgagaatttcatgcatgagtccctttaagtattgcttgttgtccatttgaaattgggtaacatatcagggtctcaattctttttatttgttgtatgccttgatttttgagcttttatattggatattaagatgggatagtatttcaagtcccttggttttaatattgtgttttgatgtgtgactttttatgatacaaatatataaaacggattcttgcaagtatctgaaaccctgtatgattttcactttgcaggtacggaaaacttttttcaccttagcattttgtgacttttgccgaaagctgcttttccagggtttccgttgtcaaacatgtggttataaatttcaccagcgttgtagtacagaggttccactgatgtgtgtaaattatgaccaacttgagtaagtaatccacaaagaacctctttcctattactttatagttaaattttcatactataaaattagtgtactttgaaagtcgtgagggacgttttgcccaatgcaattgctaaagaatttttaaaagaacgaatagtccacgcaactcttctccctcagatgaatgaacagtggctctggtgcacataacattttcactccatactctttctaaagtaacaagtactagcccttagaaatcacttttatgtaatttggggtggacatagactactgtttcagtcaagttaactattgtctttcaggacaatgagtctgattcagcgacctagtttaccaattatgttacttttctccctcactttccacctcacccatatctgtttgtttcatcttatccctgttccctttatttaagggaatacttatacatttaagttatttctttcgaaaatttccttttttctctattttatagtatgtctaatagatatactagatgttatcattgtacaataatctttctcgataactctttttgttgctgctgaaatggaatttgactttaaaattaattataatgatatatccaacttagcagctaccaaggaggcagaggcaggtgaatctctgtaagtccaagaccagcctggtccacacagtgagttccaaggctacacagtgaatccatctcagaaaaaaacaagaaggataatctaacttaccactagatatttttcttctagtttttaaactagatgatttctccctgtgatatatagaaactgactgacaacaattagttttagagctgagcatgcccttgaaagtataatataatttttttaaaaaaaaactttcaacaaaaatatatgtaattgaactttaacagttgtttctgaaagtaaaacttgatcccacattttctcactacttctgtgttctcgtgtattgaagcttctgggttttgcacaagttaggtttgttttgttttgttttgtttttgcctcacagtttgctgtttgtctccaagttctttgagcatcacccagtaccacaggaggaggcctccttcccagagactgcccttccatctggatcctcttccgcacccccctcagactctactgggtaggatttgattcttgctgtctaatgatatgctagctgaactgcctttctttgggtcttttgtgtaattgtaaaccttttcaacacaggaactgttaaattatagatattttcctccaataatgtattttatcactaatgtacatgattacagcattgaagcatttacgtgcatttggtacagaatgggattaaaagcctggtgttagagtaggtcacacctttaatcccagcactcaagaggctgaaacaagcagatctctgtgagtggagcctgaccggatctacacagtgagttactgtcttgaaacacacacacacaatcaatcaatgggattaaagttggtgtagaccgttataagatcaattgtgaagaaagtcaacataaaattcttatgcctagtcttttattcaccattttatcaggtaatggtatgacctctccttaaaaaatattaacatatgagttgataatttttcaaaactataaatcataatagagtatattaaactttgtgataagaacataaatattttatatttatagaatgcaaggaaataggatgtactcaagaaagcttagtagagttgtgatttaaactggtctttaaagaattgctggctgccgggcgtggtggcgcacacctttaatcccagcactcgggaggcagaggcaggtggatttctgagttcaaggccagcctggtctacagagtgagttccaggacagccagggctgttacatggagaaaccctgtctttaaaaaaaaaaaaaaaaaaaaaaaaaaagccatagacagagagagatgggggaaaggggggagggaggtggagagagagaatgagttgctggaagctcaatgaactcagggagtcagagcaagtgtccagagaagagagcaggtttcagagctagtcacaaagcttacctaagtttataagtagtatgtgagagactgatatgatgcacacgtctaaaatcccagcactctggaggctgaagcagaaaggtggtgagtctgagcctaacctttgctacagagtgagatcttaatctcaaataacaacaaaaagttggaagaagaaaagtaccatatgtgagaccatgtagtagagaatcttgacattttagctggtatttgcttgagatatgaaggtgtgggagaataaagattttcaaacaagctaccaatgtgataaaaatgatttggaagggaaaatttacttagcagtgaaatacagatggacatggaaagcctacggtgaagaagacagcaaagcctaaagttgagggaaggccgtgtgaagagaagcagggcattgacaaaggacaaaaggcaagtggtagcagtcctattcatttaggagggaaagcaaacacttactctaaaaatatctccaaggcattgcattcatagtagaaaaagagacaataatttaagctggctcttgaatgtttgaataggtctcttttgcttttcccattgggttaagtcctagaagtatgtggtttttaaaaaaaaataaaaagtttctctgggtagtggcagtgcacacctttgatcccagtactctgcagtcagaggcagatggatctctgtgagctcaaggctagcctgttctacagagctaactccaggatagcgagggctacacagagaaactcttatcttgggaagatccagtgggggaggggaaggaggtaagagatgttgccagatagcattctgacctagaatagttctggactgtttagtgccggggtatttatttcactattaccctcttcctccgattcttcacagtgtgttatttctttagaccctcaaaaacttatttatttatgattgattgattctgtgggcagtgatatgtaggtatttgtgtgtatgatataccctagtacgtgtgtacctctacacaggggacagctttcatgacgcagttctctcctttcactgtggaaccagagatcgctcaagtggtcagtcagggatcgctcaagtggtcagtcagggatcgctcaagtggtcagtcagggatcgctcaagtggtcagtcagggatcactcaagtggtcagtcagggatcgctcaagtggtcagtcagggatcgctcaagtggtcagtcagggatcgctcaagtggtcagtcagggatctctcaagtggtcagtcagggatcgctcaagtggtcagtcagggatcgctcaagtggtcagtcagggatcactcaagtggtcagtcagggatcgctcaagtggtcagtcagggatcactcaagtggtcagtcagggatcgctcaagtggtcagtctttcatgacagttgcacacactgtcatcttgctagcctttatttctttagacttaaagaaggttaacattaagttgctacttataattgacctgcaatttttattgcaggcttgcaatctagttgaaagaactcgatttccaggatcaaggagagacccttcctcagataagacagaaagcaatagagaaggctacctggtaccctcctcccccatcacacatagaattggaatgtgtgtgagatgagatgagatggcttaataggtaaaagtgcttgccataggactttgtaaatttgacaaaggctaaatgtggtacagctgtaatcccagcattcatataataggatggaagatcatcccatcaacaaaagtcgatacagcatagcagtaacaagagaccctacctcaaaaataggtaaaaatttgttttcttaccttcatgtgtgcatcatggcatgcacacacctgcaaacaagcacataataacaacaacaacaataataattatagtaatagtaataataacatatataatcatattacctttttatatcactagaaaatacaactgtattgtcagattgtaatagttatctctgatggctttgccattagttgtatgacttttttttttttgtagatgatcagatcaaaataatgtttgggattttaattaatcctttggctattgcaattctcttaacagaatctatagatctgtaatgcttttctaatgacagatgccagttctatgaacagagttacagaacataaaattagcatggcctatctgaaggatcataatggtaacagtacagattgtcttctagtgaagggttgctgtttctaagtgaagaaagcatttgcctctgccacatgtattttttcttaactagagggaaatggatctggtcttgaaaactgtgcaagattctctaaaagttaatttcccaatgcttttatgtcactgtgtaaaattacctttgtaaagttagaagccaattagtcaaggttctctagaggaacataatttatataatgaacttatagaatatgtgtatatgtattatgtattatatttttatatatgtacatataaatacacacatatgtgtagacacacacacactactagaatggtttacagattatggtctagctagtctactaatggaaagtccaacaatccagtagttgttcagtccatgaggctggatgtccctactggtcttcagtatctgccagaatcctgaagaagtaggctgactctaatgccagtaaaagaatggacttgctagtgagagtgagaacaagcaggcaaagagagcacgcttccttctccatgtcctttatctacgctgccagcagaaggtgtggccagatttaaaaagtgtatctttctacctcaaagatccagattagaatgggttttcccacttcagatagtttagttaaggggaaaaaaaagatccctcacagattcattccagacgtagtcaagttaataacaaaaagtagacacatcagttatattcaatatcacaatatttgatttgttgcttgttagtgcaattttaaaagtaatggtatttcttttttcctggctagctcgcacaaaaattaaacagactataagatttatttaatcaagctttatagcacagtatttgaacatttattaatctattttaatcctctaaactaatctggctatcttccagccaaaatccccaagacacttgtattttagtattgatgtgactttttctgctccaggtgtattcccatagttgtcccctcagctctcctcatggctgaattctcccttctcttctttcttttcccctcacctctctggaatcagaagtccagccctactctctcctctgctcagccactggctatcagcttttattgacaaataagaggataaatgagaacaatgtttacacaacattgagtcaggagatactgagaatagccatgtctgaattgcaggcagatatggggacagaaaaatcagcatttgaataatacaaggataatctttacacagtgttcagtaacttgcctacagttactagttctgacaacaactataacagtcctaagacaagtatgggcataccaagaaattttctaaaattaatacattacccagtttagaatataaagagataattactttctttttatcacttacagaaagttactgtgcttcaaaaaaattttaaatagtgtaacctaaaacttaagcctaaattatagtagttttctaaagagtgttagaattaaaattctgtttatttttaattttaaaattttttaagtttagttttaagaaggtatgtggaagggtcagtacaaatatatacctgtgggagaaagccaattaggtgatggccaagatccttcataggttagttataaattgcctacttcaaggaaagagtccacaatatgcaggtatggctttataagttttccaaatgatgacaattaggaatatactagttaagttgagcaaaatcagaacaaagaatatacatgccacctaatccagacttgtgtaggatgggcccactcttctttggaaagacagtaatgagaagcaaaattatagttagaggattgcttttgttaagcattgaattaaaacatacagatgggtacaataatgaaatattgctcagagttaccatatacttgccttcaagggtagagaagttaactttgaactcaggcataccttcaccctccagatggtattaatacatcacatggattttgtgtttcaagccctcttcttttaccagattaaatacagggttttatttctccttgtttctgaatcactgtcctctgaaaacagagtttttatttcttacccagttcatatttctgtcatagtttttactgagtacatttcaggagtagtttatttcctctctctctcaatgctaggtcacatattatattaattagactattctatacattctagttaattcaggctttcccagattttagtcctgaattaaaggcactattgtcctaagactgtgagtagcttaacagtttttatttctgaatacttattaactaataacattcttgtaatttttagctctttgaaaattccttagcaaaggaatttttgtttctatttttatttagctttataaagcaagaataaggacagctttaacaaaatttctcgataaccagatgaaacataacttccctcaaatccagttccattaattgtagttaggcttatgcccgtttcttttagagaatagtgtttgcatcctgttcattgaagcagactcgcatagtgaatatgaatgccctaaaatacatttctttccttatccttatatcacgagcttcctagcctgatgacgtgctttgtttaaaagacttttgttactcttaagctttgctctccaaatctttattctacccttttctattgctttttttattatatgtatttaatatgactgtgtgcatgtgtgtctgtgctcatgcacatgctgaggcacctttgtggaagttagaagacagctttgtggaataaggtctccttccaccacctcggctcccgggtcaatcccaggtcatcaggcttagtagcaagtaccttttgatccactgagtgaccaatctcattgtcccctcctactgtattttcttaccattcttttatgatttcccttgttatctcaacaatgtctttcttgtctaataacaaccaaatattgctggttagcttttatactatggggtaaaacgctgagcagtatgtgaagagaacttggtccatgttggactttccatggccagttgacacttaggctgagccttactgtatcctcccgaaagcagtaatcacttctctgctcctgagaatcttttctgaggcagctacaatctttttaggagtttataatctagcctctggccaggctctttaggccagaactcatagattttattatctgtatcaaaaatgttaattagtaagtcattctataacctattaaagtattttaatcaaaataattttagggctgggaagatgactcagtggctaaagtccttgtcatgcaagcttgaggacttgagtttccatcctcattgcccacctaaaaagttgggttgtgactgttgttgaaacccatgaccccagtgttgcaggatcacacttggaaccccaaaattgtgttatttactggggggaaaatttttcagttatgtatggtgtggctcaggccttagcacacacctttaatccctctggctggaatatagacatgcccttagtacacatgtttaatcccaaacaatgagataaagttagtttgtagaaggaagcactcatgtttgaaagtgatgactcggagaaggatttgacagaatagaatatgcccaacttgagacattcttgcccagagtccctgcagcttcctgcttcaactgtgcttctacagaactgggtgcccaacccctctgaccccagttggcttttctgagcctgagccctttgcaaattagttgctctgctgcaccttgccctgccactgccatgaccaatgctgctcccacgaaagtgttgccgaattaccatcaggatcaggaggctgctggcaaccatcagatcaactcggagttacatgcctcctgcctctgtctgtggcttgctgttttgaccgggatgatgcgactctgaagaactttgccaaatactttctctgccaatctctgatgaagctgtagaaccaatgaagtggctgaattttcctgccggatataaagaaaccagactgtgatacctgggagagccggctgaatgcagtcgagtgtacactgcacttggaaaggaatgtgaatcaggcacaactaggactgcacaaactgactatggacaagaatggtccccacttatgtgacttcactgaggcacattatacctgagtgagcaggtgaaatccatcaaagaacagggtgaccacgtgaccaactatgcaagatggtagcccctgaatctggcatggcagaatatctctttgacaagcacaccctgggactcagtgatgaagctaagctgacttccccaaagccatatgactttactggtcactgaggcagtgcatatatgttgggctgcctttatcttttctgtaagttgcaccaaaacatcctcttaagttctttaatttgtaccatttcttcaaataaagaattttgatacctccctcaccccaccccaccccaccccacccccaaaagaatacccaacttacaagagaaaaaacgaggaaaaagaggcttcttaagagagcagcatggccgggcgtggtggcgcacgcctttaatcccagcactcgggaggcagaggcaggcggatttctgagttcaaggccagcctggtcttcagagtgagttccaggacagccaggactgcgcagagaaaccctgtctcgaaaaaaccaaaaaaaaaaaaaaaaaaaaaaaaaggagagagagagcagcatagagagaaaaaaggagggaggtagttttactaggttacagagagagaacaaacttgatcaggtgatgagagaatgagaaagagccagaaaattagaccatgttgccaaagttagtatgagttcaagcagagcaattcaggagaggctgcgagagaagccagattcagtcagtcagcttggagaagagttttgaagcagaacacctgagttgaaccagtcagccatggttcagaaagaagaaggaaaaagtgagcttagtcagcagtaaagctcagaggctgaatacgttcaaggcctaaagtaagactgcatggaggctagaagtctccatgactaggcctagcttagccgactgaggccataagcctccgagacaatttcttccagggaataaaagatacttttacaccccagtcctgggaagacagagataagaagattttcggagtttgctggccagcagtctaataaccaattgtaaattctagcttcagtgaaaagaccccgtcttaaataagtggagataaagcaattgacaccagtttctggcttccatgagcacctcacaactacaataccccaaatttttttagttattttaaatatttgcttcagtgtttaatattttatggttcttcccccctctctctttggtctctggtgttaatgagacatgaaaaacattttgaaatatggacaataaatggcaccatattgattatcttccaagattttggagatggtatttgatattataaaaaaattcattcaatactggtattaagtagtaattctatctttagggtcctaaaatgtacaagaatattctcaaaattacttgtaactttctaactaccttcttcagatttttatttcagtaactttaaattatgaaaaatagtacataagaaaacggcatattttattcaactagtctctacctgaaacattttaattctatatataattttaaaggataattaagaacttctactgatgaaccacaggtaatttctagccatttgtagattcctctggagttttctggtctgcttttgagcaaagctttggcagtactagttgtaggtatgttttttttaaaccaatgctttttgtaaagctattactactggaatttcgtttctttaaagcttatcattttaaatacaacaatcttataactttcattttaaatattattattaatataattgctccaactcttatcttccccatgacttggtttttccaggccccaaatcctcaccagtccatctccttcaaaatccattccaattccacagcccttccgaccagcagatgaagatcatcgcaatcagtttgggcaacgagaccggtcctcctcagctcccaatgttcatataaacacaattgagcctgtgaatatcgatgtaagtacagcactgctagaactaaacaattggagtgtgtttctctggttttctgctgtacttttaatacagattggacgtaaatgccacttttcatttatcatgtaaatgttgggctcctacattatagctccaacaccctgtcacggtctctaatgacagtaagggcttcaccgttaccaagttgcacttattctcacttttttctatgacactatgtctgaaaatggttttagttaaaatgactttatcttaatttaaatttaagaatttgaatttaagaattaatagatgcccatgggaattcatgaattctctaagatttttgtgcaattaatgtgttatgaaaatgacattaagaatttatatttttttctgtcatgagtttagcattagaaccaacaaaaacaattctaaatttgtatttttaaaaaatcttacagttggaactataacttaaactttattaactttcaaagtgctttattataaattttatttaattaccaagataaatcatgaataaaagattataaaatcagactttcttcctagtttttattaggtgcccccctatattttagagagtacgttcatataagtagctttttcctagtatcctttttaactaagacctttctctctctatgtagacctgaacacacaggaagagacaagtgggaaagggagatatgggaggaaggaggttggagaataaggagtcaacggtatctgtaggttaggtgtgttcttgatgtgttcaagctcagagcttcatctttatttgaaaacaaaccgccttttaaactcttccccttttctctgcttgtgactgtcctcctggtttcttgggcttggctagttgaagagtcacttcatgccttcctcttacccttttcataactgccataactgtttttccccattatgtcttagactctgctgacttattgacaccatttgcctccacacccttcattggaacctctgaatgcatttattcccacacatttccacctcggtgctctcaccgggatacatttttatgatactttttaaaaaatatttaattggggctcacttacagtttcagaggttcagtccattttcatcatcatgaggagcatggtgacatgcaggcaggtctttacatcttgagccgcaggcagagagacagagtgtatgagtttgagtctggtgtgtgcttttggaatttcaaagccaacccctagtgacacacttcctccaacaaggctacttcctggtaactaagcattcaaatattatgaagatatggggatcattcttattggaaccaccacatagaaaactagtagaaagaagccaaccaggcattgtggtatgtgcctttagtcttggcgctgagagctaaaggcactagagaatcagaagtgagaggccagcctatgatacatggtaccctggagaaggaaggagaaaggagagagtgaatgagtttagcaattacagctgatcctacttgtgcagatgttcatagatagcaaaggtattgccagaagctctttagttggtttcttctatgatgttgagtcacagggatgacagacaagggactagaagagattagggaacagttgaaatcgttttaaaatactagagtatcctatttaatctaggttctagtagacagatgaactgggagctttaagaacacgtgagattgagaagtgtaaatgtgtgttggacctggcaggagtggaaaagccacattcggctcatctgtaggtgtggggggagtttcagagctagggtaggaaacaggaaaagggatgtaactgttctcttgtggggccatctatctagaaagccccttgtttttatacatgcctgtccattcttcacagcccgttctcaggtttcttcagctgcttcaccaatgccaaaatactagtgtcatttcttttgcactatagtcaccaattctcatagatgtggaggctggaaggccagtgtcagatggctagaacatcatagtcttaatctatgtcactaaaagccttgtcaataccactacatggtagtaaattataataaactgatgtatctctcttttattctgaaatagttacttatttttcatgtgcctacatctcactgtgtgtttgtaagctctgaaaccaaggaaaagtagtgaaaccacaaagacttttgtgtgttgaaggttctatgtagtacaccagtaaagaattcactttttattttaataagcaaaattgtgcctatttgccactaacctttttagagacatttgtggccttttaatcccttacacttaagttaagctgagtaaactaatccgtgttctgtagactaggatccaaatttcattacatatggaatttcccctcctgccaacattactgtaaaagctgcattttaaatatagagaccaatttaaacaaaatccttttttgagctattttaatctcccctcctttttaatgtttcttatacatccacatttttatggtagtattcagtgtgcttttaattttgtattttttattaaatgtaaacatgtttcatgttttaagtttcataattgcttggtaactgtgtactacttcataaattgatacaccataaccataatatgtcaaaatgcctatcataggggagtaattatttctgatttttggtgtgatggataatgctgcactaaacatctttgtgcatatcattttttcttctgaattatttccttaggaaaaattcccagaagtggaattacaggatcaaagggtatgaacatttttatggctcttaatatgtgccagtaggattttctttaaggatttgtgaagccactgagtggactgaaatggatttcagcatttgacaaggactaataatcctttcacataggtctaggttggcaagtgcttcaaacgttagtgtttgtcatgtacactagctaatttaatagtctttgctttgtgaaataattataagacaggtattgttttgaattaacccttctgcttatgcatagtagaaaatccgttgttgttgttgctgttgttattacttttttaccatgtgctttgaataaacatattttactatttgtttgtaggatttgattagagaccaggggtttcgtggtgatggaggtaagtagtgactttagggttgttgttttattttgttttgttttgttttgttttgtttttgttgttgttttaaggcaaaagtgcaattgctttgctgcttgtctcctttatggttgctttttctttttttttttttttcatgaaacagacacagagaaaaatgtgtagagaaaaccaaagggtttttggttttttgtgtgtatttttttaatcgtagttatcatttattggtagcagaatttaaaattatccatgacaaggagagaaaatgagaagacatggaagaaagtcttaaatgctccccttccaatcttaggtactccaccaaggagggtccttaattcctttgtccactttttaatttttgctgcctccaaagctggagtcactaaatgtcttttggcctacaccaaatactcacagatagagcttagaatcaggttaaatcattctatatcattctttgggattgcctgccacatcccctcaatttgtcagactttttcaagcatttcccacccactttatagatctatttggaatacatatttatttcatggaatagacccataatggaaaaatttagtcactcccttgttggtatagtaaaaaatatatacaaatgagagattatattcatagaaaaatttagttatccccttattggtataataaggaaaatatacaaatgagagattatattaagattcttacagaatttccatctagctttccctctagtaaagataatattgttttaagaaaatgctttttgagccaaatgtgatagcatatgcctgtgatccgagctgaggcaggaagaacgtaagtttgaggctagcccagtatacatagtatggctctctcaaaaaaaaacaaaacaagcaaactctgtaataatgtaccacgtatgttttctaaaagattgcatttgagactgtcttcacattttcttgcaagagctcctctgtgctttccttctcagctgccttctgtcttacaaggaagactgtaggagctgtacaccatgcctagagctgggttcttcactgtgaccttctatatctgcaaaataggtccaagcccagactcgatatttttatactgaaagtaaacattgtaagccatattttgttatggttctgtactctgtgaagnnnnnnnnnnnnnnnnnnnntaacgagcctaaattatgtacttaatattgactttatcacatattcaagagtttgtgttgtttgttattccatgagcctgccaattaatgttgctgccagtttgactttcatatgtcttagtaactgtggctgctgataattttgcccaatacatccagcatttaaatgtttccatcgtgttagcatcacagttaacttagtagtaaacagcctgcttagtacctaaagtcaagtggcatttcttatttttgttatgagtcactttgaaaaaattaattggggtttttgtgaaaatataagcagatttttaaaatatcatccagaattattttgtgaagcaggcttcagttcatctaatttattccccatgacttctttcatttcttctgtgtgtctgtcttcctgtgtttgcctgcccctctctttctcttctaacagcccccttgaaccaactgatgcgctgtcttcggaaataccaatcccggactcccagccccctcctccattctgtccccagtgaaatagtgtttgattttgagcctggcccagtgttcagaggtagttgggctcttctttcttgttctcacccaagcaaactaaatataagatacagactctgtttgtgcctccctcacagcgtgtgtttgtaagtgtgagagttaagtactaagtttctgcttggcctggctggagtgctctgaatgtgcttctcacaccctcactaccgcaagcctcctgtgtgctgtctagtacaaagtttggaaagcaagagatttcggagttaacatttccatcttgcttaatgttgtcttatttctacttggtcttgataacttcttaaattctgggagacacaggcaggattctttttattttagtgcattggatgataattttcaattaagtaatattaatttgtttaagaaaataaaaatgtatatggaaacccctatgaaaaagggtgttttatattgggcgtatggctcacatctgaaacttcagcacttgagatgcagagacaagaggaaaatcactgcaggtttgaggccaaagtattcttatgagacttttgatagtgttttgaaatttagtaatattaatcattttttgttctattttccccttatatatgatatatattttagttaatctataaacatgagttcaaaaacactgaatttatatattgacttatgcccctcacataaggaaagttaataactgtccagtattttaccatgtcaatttactttaaaattgacttaaattttaagatgaaattggatatctttttaaaatatgtctacagttatctttattgctttgatacactgagtgacttatatttagtataatgtggtgctttagagatttccatcaacccagctacttttcagataaaccataatatagtggaagtcattcagtacttagtgatgtaattaaactaaataatccagtgataagaactgtgcctgaggactgggcaagttgttactgctccataaagtggaaagttatcagtgaccagtgtaaaatgtattgtgctctagttcaaagaaattccagacaccattctcttttagaaatttgcatatacaatcatagaattttcatatggtgctataacataatatagtggctacctagaaaattctacctagaaatctcaggtctattcactgtacactctggagagtctttgctcaaaattcctgtcccagatactatacatattgctactgagttaactggaagtttacatatttaaaaaagttccatttctgctgctcagagcctacttacaaggttcactttgcatataaaatagtagaatatatgtgaaatatggatgatatgccataacctttacttgttcacttttataataccaaggtttcagaaagtcttaaagcctctttagtgggactggggtggtagctcatcagtttataagcactggctgtttctccataggacgcggttcccttcccagctccactgtttgtaactctggcttcaggagctctgataccttcacacagatggcacatacaggcgaagcaccagtgcacataagataaaaataaataatttttcaaaaagaaagcttccttagctttgttcatattaactttgcacaaaaggtaacaaagagtctccgtctaatagaaaaacctcaccaaccagtgacactgctcaccgtctgtctcttaaataatagaacatgtagtctgctatcctagataaatgtatggctaataggaaagaaatacttaacaggaaggccattaaaatgtttcagttttaatgtttacatgtttttgaaatattgaggctactgaaataaaaaataagtttgttttgtagaaataagcattgattttgtttttgggttcttgttagttttttctgttttatcacacagggtctttgtattatgtggctctggctatcctagaattctttctgtagaccaggctggcctcaaatgcagagatttacctacatctgcctcccaagtactaggattaaaggtgtgtggcaccatgcctgtgcatttgttatgatgttttaattatttatcaaaggcacaggaacttgggagtgaattttagaaattgtgtcttggcttagagattgtgtttttctaaacttgtttattattatttattttaagggtctttagattggcccaaaaaacaaaacaaaaaaattactgtacaaattacatattatgtttcttttggcctaccctttgttaagggccaatatttaaatatgcactccatttttaaagtctagatctccccactttctgcccctgttgtgtggacatatttgttcctccttaatgcttactcctccctaatgtggataatttcccctttttctaatttagggtcaaccacaggcttgtccgccaccccgcctgcctcattacctggctcactcactaacgtgaaagccttacagaaatctccaggtcctcagcgggaaaggaagtcatcttcttcctcatcctcggaggacagaagtcggatggtaagcatctgtgctgtgctcctctaactgtgacgccgggttcccatcacatggaatattgcatagcgcatatgctcacaaaactgacttttgctctggtttctaatatagtttttgagggcattttgaaagggaaataatggtgttctgtttctaaaatgaggagaatgagactaagcaagtatttagaaggcatgattaggcatataaagcatatgtgctctaaaagctggtgcagaattcaagtgtctaccaaatggcatccttccatatttgaaaaataactttcttctacttctaccttatccaaagaattggtatattggtttatttatttattcctttatttatttatgtttgatggccaaatcagttaagacatgtaaggaaatccagcagcactagttagagcatggtaacttgaattgttgggacttgaagccaaaactagcctcgaatgtatagtttgtatcatgcctctgtagttctccacatagttaaaaagccagtttattttaagaataacaaatgtatttctacacatactaaatcatttctactttgaactttttaattagtattcttttgtgtgactgtgtgtataagtccagcatgtacatgcccagtggtgaaggaggtcaggggagtgtaacatatctcctggaactagagtaagaatgtgagctgctagctgagtgctgggactcgaacctgggtcctctggaagaaaagccactgcttctaacttctgaactatctctccagcaccaattatttctaattttaagtaattattccatcctcatattggctcattttaaatgtaactttatattttgagtcacaaatataactattacttcctcaacatggatattttatgttttctttcttcttcttttttttagaagaccttgctctgttcctaacttcctgtcaggcaggtcaatatagttagcatgaaacaaggtttttctcttttgtttgccttggcttgacttttgtactctatttttcgagaaaacacttggtagaagagattcaagtgatgactgggagattcctgatggacagattacagtgggacagagaattggatctgggtcatttggaactgtctacaagggaaagtggcatggtatgtatgtaacatggtgccattggcacaagtgggacatggtatgtataacacgatgccattggcacaagtgggatatattaagaaatgtttattaaaaagaagaagcagcagccaaagctgggtgtgatagcacacatccttaaacccagcactcaagaggcagaggcaagtagatctgagttcaaggccagcctggttcacagagaaagttacagtacagacagggctacacagatctgtcttgggaaggaacaacagtcatgatgacatacactccgatattccccacacttaggaggtataagcgtgaggattaggaattcaaggacatccttagctatggagaaagttcaaggtcaacttaagtaacaagagattgtctcaaaaacaaatatgaagtaaaaatattcactgtttacaccattaaactgttttcatcaaatgcaggagtcctccaaaggtttctaacaaaaatggtggaccataaaaactggcttcagagtaactaagattgctgttatactttatattaatgattcataaagatgaaggtcttctagctatcagtcccaaaggaagttcgtttttcttttagaagtattccttttgatgattttatgggtattataaatcaaaagttaacataaaaagtgttcagcctcactagttttctaagaattacaaactcagaagacagacgtcatgactttctttgaacatagattttttttttaattgatcatgtgaagattgtgattataatcctgtttattttgtagaaatatgaaaagttggcgataggtacactgagcctaagcacgtaattgaacagcaatgaataggttgatggttggggaagtatactcactagcggtataataataatagaaaatgaaaataatgtgagtactcactagtagaagattcagttagcacattgacacatccatatattgttatataagaatcaaaattatataatagttacattgatatggaaaggttttaatatattgatttgtttgaaacagcatgtataatgcctttatataaagatctatataaaatgcatttaacagtataaaaatgctatctgaatctctcaagtttattatttcgtatacattcataagttttatactgtatgcatatataagcatgtatatatgcataaatatatatacacacatatatatgtatggtatatataagttttaattctgagtgccatagttaggagaattttttttaatgatttactcatgattatgagtgctctatttgcatgtacacctacatgacaaaagatagcatcagatcccattatagatggttgtgttccatcatgtgtttgctgtgaattgaaatcaagacctggaagagcagccagttctcttaactaagccatctcaccatctcctatggaacatttatgttttcctaaaacatttaagtaataagcactgttaggtagtatccaataaaatgaatactatagaactttggtagttaagaaaaatcaagatttatagtgattatgtttaaatgtattaaaatgtctacaagtgtttaggtaattgaagctcaccaagtgaataaatacatttgtgattaataaatgtaatattattagccttctagaaggtctccacatgccttcttcattcactcaccctgcaaagacaacaaacatcctaaccacaatagaatatattgtgtaatctttctctcaaatattttatggtccatcaatgttgttgggtatgtttgtgttttatttgtcccctgaatagcattccattgtgtgagtgaaatgtgattccttccatctattggataataagcatttgggtacttcccactttggtgcaattctgaatgatgttgctgtgtatatttttaggatatgtcttttaaagaacatatgtgtattttttactggctatatgcctaggagagaattttaaaactacaccatatgcatacttgcaattttatatatactcccatcggtgctgctaagtaattataccagtttatatacccaacaaaagtgtataaaacactagaagtatttaaactacgattataattttaataatttttccagtccacataagtaagccataacgtttggaaaaaaaattggcaggtttttactttaagccaagttgcactggacctgttttgttgtccatggttcgagcactcactgaccaggtaacattttagtcaacatcggtaactcattaggagaactctccaagtacttagttacctaagtgtattcccagggtgaggaagttcactatattttagcatatattttcaaacaatagtataggaatatcattgttagttgctttgtgtgggattgaaggatgtgcgtgccccatagtatgtgttaaaaagaagaaaagtagtttattactaggtagttaaatataatttatttacagtttaatagggatatgaatttaaaactgacaattagcaaaaaacccaagaataaatatttcacatttcacaatttgaaatcttgggtaacaattttctttcaggtgatgtggcagtgaaaatgttgaatgtgacagcacccacacctcaacagctacaggccttcaaaaatgaagtaggagtgctcaggtgagcgagtggccacagctttccagtgcagtgacctaaagaaacaaagtgtggctgcttagacttcacgttcccattgttgtccaccgtttgctcctgcatctagaaaactgaattaatggaaataagaaatgtctgattgtgtctaatagtagttccttttaggaaagtaatactctaaatgtcctaaatgtatcaaaacacgtttaaaattgtatttagtcctaggccctaggacatgaggaacattgacaaatgagagagagtaaatccatgataagaaaacttaggaaagattctgtggttaaaatcttatgtgaggggagtgttcaaccaaactgaggttttaatccagagaagtgtcttgtattcaagaaggtacacagttactctgctattgtaaagaacagaacgaggaagctagctgtggtggttagaggaaaatgggtttacgtccacatagaaaacctcctaataaatttggaacaacttaaacaaatgaaagcaacctcagctcctagcttcctcattcgatatgtttctgtatttctgagtggagctggaggttaaactcagtaattagagctcaaccttgctgtgtttctggtactttttccttgagcaccgtattgatttgactctctttaaagaattgttactcattgtcacgtttctttttggcaggaaaactcgacatgtgaatatcctccttttcatgggctattctacaaagccacaactggcaattgttacacagtggtgtgagggctccagcttatatcaccatctccacatcattgagaccaaatttgagatgatcaaacttatagatattgctcggcagactgcacagggcatggagtaagttcagtgctgttaaatcttcatatatggcttttgaaacccacttaaggatacactaaaggtcctgatgataacctcttatgggttgcagaggtactaactactagataacacttacataatcaaaattgctatttctctagttcagcctttaacatatataaggaagaagtaaggtatttgatgagaagtttataattgcaaatgatgattagcactaagtgatttatataaacagtggaagtacagaaaagcaggagccctcaaaaaaaaagaaaaaaaaaacccactaccactaaaaaaaaaaaaaaaagccattaaagttaataggaaatatgtgactattattttaaatgaatgtctatattttgatccttgttgagaacttcaagttgtaacaggtatatctactgaattttactttgtaattcaaaagatacgttattttatgatttatactgattaaaatgaaccaggggtaggtgtggtggtgtaca

SEQ ID NO: 200 - DNA, 2164 bp, Mus musculus
  misc_feature (1)..(1): "n" at position 1 can be any base.
ncggcgctggcgccgcggcctcttcggctgccgacccggccattcctgaagaggtatggaatatcaagcaaatgattaagttgacacaggaacatatagaggccctattggacaaatttggtggagagcataacccaccatcaatatacctggaggcctatgaagagtacaccagcaagctagatgcccttcagcaaagagaacagcagcttttggaatccctgggtaatggagcagatttttctgtttctagctctgcatcaatggacaccgttacatcctcctcctcttctagcctttcagtgctaccatcatctctttcagtttttcaaactcccacagatgcatcacggaacaaccccaagtcaccacagaaacctatcgttagagtcttcctgcccaacaaacagaggacagtggtacggaaaacttttttcaccttagcattttgtgacttttgccgaaagctgcttttccagggtttccgttgtcaaacatgtggttataaatttcaccagcgttgtagtacagaggttccactgatgtgtgtaaattatgaccaacttgagccccaaatcctcaccagtccatctccttcaaaatccattccaattccacagcccttccgaccagcagatgaagatcatcgcaatcagtttgggcaacgagaccggtcctcctcagctcccaatgttcatataaacacaattgagcctgtgaatatcgatgatttgattagagaccaggggtttcgtggtgatggagggtcaaccacaggcttgtccgccaccccgcctgcctcattacctggctcactcactaacgtgaaagccttacagaaatctccaggtcctcagcgggaaaggaagtcatcttcttcctcatcctcggaggacagaagtcggatgaaaacacttggtagaagagattcaagtgatgactgggagattcctgatggacagattacagtgggacagagaattggatctgggtcatttggaactgtctacaagggaaagtggcatggtgatgtggcagtgaaaatgttgaatgtgacagcacccacacctcaacagctacaggccttcaaaaatgaagtaggagtgctcaggaaaactcgacatgtgaatatcctccttttcatgggctattctacaaagccacaactggcaattgttacacagtggtgtgagggctccagcttatatcaccatctccacatcattgagaccaaatttgagatgatcaaacttatagatattgctcggcagactgcacagggcatggattacttacacgccaagtcaatcatccacagagacctcaagagtaatagtatccttcctgaaattgatatatttcttcatgaagacctcacggtaaaaataggtgactttggtctagccacagtgaaatctcggtggagtgggtcccatcagtttgaacagttgtctggatctattttgtggatggcaccagaagtaatcagaatgcaagataaaaacccgtatagctttcagtcagacgtgtatgcgtttgggattgttctgtacgaactgatgaccggccagctaccttattcaaacatcaacaacagggatcagataatttttatggtgggacgaggatacctatctccagatctcagtaaggtacggagtaactgtccaaaagccatgaagagattaatggcagagtgcctcaaaaagaaaagagacgagagaccactctttccccaaattctcgcctccattgagctgctggcccgctcattgccaaaaattcaccgcagtgcatcagaaccttccttgaatcgggctggtttccaaacagaagattttagtctgtatgcttgtgcttctccgaaaacacccatccaagcagggggatatggagaatttgcagccttcaagtagccagtccatcatggcagcatctactctttatttcttaagtcttgtgttcatacagtttgttaacatcaaaacacagttctgttcctcaaaaaattttttaaagatacaaaattttcaatgcataagttcatgtggaacagaatggaatttcctattcaacaaaagagggaagaatgttttaggaaccagaattctctgctgcccgtgtttcttcttcaacataactatcacgtgcatacaagtctgcc

SEQ ID NO: 201 - DNA, 1845 bp, Mus musculus
atgattaagttgacacaggaacatatagaggccctattggacaaatttggtggagagcataacccaccatcaatatacctggaggcctatgaagagtacaccagcaagctagatgcccttcagcaaagagaacagcagcttttggaatccctgggtaatggagcagatttttctgtttctagctctgcatcaatggacaccgttacatcctcctcctcttctagcctttcagtgctaccatcatctctttcagtttttcaaactcccacagatgcatcacggaacaaccccaagtcaccacagaaacctatcgttagagtcttcctgcccaacaaacagaggacagtggtacggaaaacttttttcaccttagcattttgtgacttttgccgaaagctgcttttccagggtttccgttgtcaaacatgtggttataaatttcaccagcgttgtagtacagaggttccactgatgtgtgtaaattatgaccaacttgagccccaaatcctcaccagtccatctccttcaaaatccattccaattccacagcccttccgaccagcagatgaagatcatcgcaatcagtttgggcaacgagaccggtcctcctcagctcccaatgttcatataaacacaattgagcctgtgaatatcgatgatttgattagagaccaggggtttcgtggtgatggagggtcaaccacaggcttgtccgccaccccgcctgcctcattacctggctcactcactaacgtgaaagccttacagaaatctccaggtcctcagcgggaaaggaagtcatcttcttcctcatcctcggaggacagaagtcggatgaaaacacttggtagaagagattcaagtgatgactgggagattcctgatggacagattacagtgggacagagaattggatctgggtcatttggaactgtctacaagggaaagtggcatggtgatgtggcagtgaaaatgttgaatgtgacagcacccacacctcaacagctacaggccttcaaaaatgaagtaggagtgctcaggaaaactcgacatgtgaatatcctccttttcatgggctattctacaaagccacaactggcaattgttacacagtggtgtgagggctccagcttatatcaccatctccacatcattgagaccaaatttgagatgatcaaacttatagatattgctcggcagactgcacagggcatggattacttacacgccaagtcaatcatccacagagacctcaagagtaatagtatccttcctgaaattgatatatttcttcatgaagacctcacggtaaaaataggtgactttggtctagccacagtgaaatctcggtggagtgggtcccatcagtttgaacagttgtctggatctattttgtggatggcaccagaagtaatcagaatgcaagataaaaacccgtatagctttcagtcagacgtgtatgcgtttgggattgttctgtacgaactgatgaccggccagctaccttattcaaacatcaacaacagggatcagataatttttatggtgggacgaggatacctatctccagatctcagtaaggtacggagtaactgtccaaaagccatgaagagattaatggcagagtgcctcaaaaagaaaagagacgagagaccactctttccccaaattctcgcctccattgagctgctggcccgctcattgccaaaaattcaccgcagtgcatcagaaccttccttgaatcgggctggtttccaaacagaagattttagtctgtatgcttgtgcttctccgaaaacacccatccaagcagggggatatggagaatttgcagccttcaagtag

SEQ ID NO: 202 - DNA, 96595 bp, Homo sapiens
tgccaccacagccctgctcccactgagaagtctcctgcttataaattttaaaggcagttttagccacatcttctcttcaacatttcaaaaatctttgggcctggtctcatccaaaacaatccactgcacttatgtccaaaatgtattatataacatgaaatgtaaaacgataaaatagtcaatcttctccttaaagtaacagggctcctcctggcttctgaatttcctaacctccaacttcttctattattttagtcactaataacttttcctagagagtgaatgattgtcctgtacaaaatcaggcatgacatgtttatattcatgaaaacaaattcttttttttttttttgagatagagtcttgctctgtcgcccaggctacagtgcagtggcccgatctcagctcactgcaaactctgcctcccaggttcaagccattctcctgcctcagtctcccgagtagctgggactacaggtgccaaccacacccagctaattttttgtatttttagtagagatggggtttcaccatgttggccaggatggtctcaaactcttaacctacactgatcctcccatctcggcctcccaaagtgctgggattacagacttgagccaccacacccagcctatatttatgaagagaaattcttatatgaaaagtgccatctacaaaaccacactaattctgaataatgtaagagagatacatatatatatatatatatatatatatatatatatatatatatatgcatctctgagtaattagaatatttgcctcccaagccattaggttactttaatgtataaaatatataaactgtgattgacatatatactagcaatctaaatcagatatagctataaaatgttaaattaatatttggcctatattatctaataatgagctattaaaagcataaggaaatgattaaggcagatgctgaaaccagaacttcaaacccaggagcaactgagatggccagagaagtatcaaagtaataaataaaagagttttaaaagggaaatattcatattttccttcagtagaggacacctaatgtggaaagatgtgaaagtgaagacatatacatttaccaaagtgctgttgaaaaacttctgaagtagctgaactcaattactgaaaatgattacagggattcaatgaaagagatttatgttatatctgcaacagagaataaaggatagaattagtatttgtctttaaataataaagttaaaaggtggtaactaactgagatttttaaaaattacaggttgaatagctgatgaagcagaaagtgggaattgtagagctcagcttgggacttgccagtttggcagtgtttgtgatatattcaggtgcagacatctagtaagtagttggatacaacaggttgaggccagggaaaacattattgtaaataaaaccaatggaatgggtaagagggtagaaggagttctgcaacagaccagatgtttgtgttcccccccaacaagttcatacgttaacgtcataacctccaatatcaggaggtaagggctttgggagggtcatgaggatgaagccctcatgaatgggattagtgaccttataaaaaggggccccagagagctctcatgtcctctttctgccacatgagaacacaacgagaagacagcagagtgtaacacagaagagggccctcaccagaacctggctatgcaggcaccaggatctcagactttagcctcaagaactctgagagatcatttctgttgttttaaagccacccagcctgtagtactttgccatagcagcctgaactgactgagacaagttctgtaagaaaagaaataggcaaagaatggagccccgtgttataccaacagttaaactgcagatggtcaaaactgaccccattaaggaaaccgagaaagaactggccttcaagaaaagaagcaggagtatgtagcatcatgacatctaaagcaacagatattttcaagaaaaaggaaacagccaaaagtatcaaatgcaaaaagaggagcaacacttcatattgtgaggcagaaaaggaggtaagaatgaacaaaaatgcatagaagtttatagttgtaatttgaagctacagagttcatatcttacagcctatattttctctgtggagtgggaagcaagatctcataaaaacatatctatacctaaggatcaaacacaagagcaaagcacagatttgaaaatcggcatcagagatattaaacacacaaaaacaggccaggcacagtggctcacgcctgtaatcccagcattttgggaggctgaagcaggctgatcacacggtcaggagttcaagaccagcctgaccaacatggtgaaaccccatctctactcaaaacatgaaaatcagccagacatggtggcgtgcgcctgtaatcccagctactcaggaggctgaggcaggagaattgcttgaacccgggaggcagaggttgcagtaagctgagatcgtgccactgcactccagccttggcgacagagggagactccgtctcaaaacaaaaacaaaaacaaaaaacacacacagaaagagaagttctggtatctgtaaaagtgggggtactattagatatgtactctttaacagtgtactgtatttaaagctctcctacagtaatgataaatgttaaaacaaacaaaaaaaatctaagactgtcattgttcagattatataaacagcctagcacagtagctggcacacagcacacagtagctatgcgataaatatttgttgaataattgaggaaataaaaaaatggaactaggggacaccataaaaatattttaagaagaaaccaggaaaggttttgctgtaaatgtttataattaaaaaagcgtattccatataaacacttagaataatatacctatatttaatatatgggaaaattcctacttgataggtagagatacattacaaggtcttattaaaacttgatcaaaacccataaaaaatgttgtcttggctgggcatggtggctcacacctgtaatcccagcactttgggaggctgaggcaggcggatcacctgaggtcgggagttcaagaccagcctgaccaacatggagaaaccccatcgctactaaaaatacaaaattagcctggtgtggtggtgcatgcctgtaatcccagctacttgggaggctgaggcaggagaatcgcttgaacctgggaggcagaggttgcagttagctgagatagcaccattgcactccagcctgggcaacaagagtgaaactccgtctcaaaaaaaaaaaaaatattgtcttgcagactcttattgtctatgaatcatgatgcaacacggtttaattccaaagtatcagaaaacaaaaagcatttacaaagtagatttatcaggaatagagtttaggcagataatgcaagaaaaaggtaacaatacaatagtaacagtaatagatacctaacacgttgttaattgtctgtaagaaacattcctttagaaactcaatacaacattttaataccataaatgtatattatttttatattacaaaagaaaaatttctttcagatttttttgagaaaatttcaaatatacagaaaacttaaaacatagtattacagggccagatgtagtggctcgtgcctataatcctagcacattaggaggctgaggcagggggattgcttgaggccaggagtttaagacaagctagggcaacacagtgaaagcctgtctctacaaaacattttacaaaatttaaaaaagaatagcattacaaacaattactatatccttcatctagattctccagtcgtttttcttccccaattgttaatatttatcacattttctttatttctctgtctctttttctgaactacttaaaaattgaagacatgatatttcatccctaaacactacttcctcataaaataaagaacattaattaaattaattaccattaactcaaaatgataacttggtatacagcccatatttaaatttccccaattgtcccaaaaatatccttgtagtttattttcttattcaggattcagttgtttcatgcattgtatctggttcttacatctccttaatctcttttaatctagaataatcccctctgcttgacttttttgttcctcataatactgaatttttaaagagttagagtgatttgtcttgtcccacattctggatttgactatttccttattatattcaggttaagcatctttttggcccaaatacctgcactacataggtgatgctttgcacaagcacttacgtaatgttcaactgtatccctgtttgtgatgctaaatttgttagcttgaggtgactgccacatctctccattttaaaggtagcatctccctttgtaattgataaggtctgtgtgatggtactatgaagccatgggactgtcctatacctcaaaaatctttcacccaataatacttttagcaactcttgatggttctgatctggagtagtttttatattggcggtcgcaaaatagtcatttttctaaatccgtcattcattttttctatagtaactagaattcatccttaaaagaaacttcacttcttacctttctttcaacacttttctttcacacgatctctttctctctctcattactatggacttacggatttaaaataattaaatatattgcaacccattcctgtcattattatttcttatctttctattgtcccattttggaccaatgggggtcttgtagttggctccttttgacatgacctagtagtctttaataaagtccttgctctcaagtataccaaggctcatcatatgcaagctcaatttataaatttcctgccccagatctggcatcagccatttctcaaaggagccctggttacttttagtggagaatggcatttcaaaatcaagatgcaggtaccaggtatacttattgttactcctaagcacccctttcaatgggcagagctaagaatacatgaatacacacacacacacacactcctatgttcatattgctacctcaaattcaaatacaacaccaaagcattcttcttcaatttcccttgttctatatttgtttctcactttttccacagtaaaaaccctgattcccaactttaacatatgtactcattcagttctattccacaataaacacaaaattgtttcagaattacaaaaccaatattgctatcaataacaaaccttctaaataaagttaaagatttacttgtagtttgttttgtccaaatttggttgcaagaaaccaaatttgcaaggaccaaatttggaacggtattcaatttataggtctatgttttaagaggaacactgaaaagagtatacagcaagaagagaaaatgctcgggagagaaaatgctaaagcaaacagtttccttcaaacacttaaaagcagttacacagaataagaaataggcttatcctgtgttcctctagaaggcaaaactcagaccagaatatagatgtcataaagaggaggatttcaattcaacttcagaaactgttagagttggatgtactatattagtaaggtccccatcattaaagtatttagacagagtctggaattccacaaaggggtttctgagcatttctcagtgggagagttgtgctgaatcagctctataattctattttctgttcgcacccaaatagcttctggaagcagccctccattaaacaatacaggaggtgttgttattcataataatgaccttgattcatatagaaaatattgaactatgatcagttatacatcattgaatctggttggcactgcagaagcttcctagaggctgcttgcttgttttccagtagttgatcatatcagtgtgggatcagacctggctgggcaggcctggctggctggtgggactctccagcatccattaaaatagaatgcaagattcgagatagaaatgctggtaggaaataaacttgtgtccggggaagaaagggtcagacctggcagtaaagctctgaatagtgtctcagtcatcaactgaagcaatgcttgagcagtacctctcacctagatttgttttccaacttcctgtgaatacatgaatgccttagggcgaaaggggattttgaagaaaacctaaaagagctgtgttgattaaaatgtctctaagactttagaatgcaagataatgctgctttgatgcccatatggcacattacaacacaaaagggaggtgttcagttttggctcagactacacaccagcttagctcattatgggctatgggctgcagggacactgttttgtgtagagggtttcagcacatcaacactgcctatggcagcactgggggtttgggggaggtgctcagaagacaggctgtgtccaatggcaaaggacttgtatctatttatgcatgcagtggaggcctcagaagctgaaaaaagaaggtaagggcttgttcattagcatactgtattagtccattttcacactgctgataaagacatacccgagactgggcaatttataaaagaggtttaattagacttacagttccacatggctgtggctggggaagcctcacaatcatggcagaaggcaaggaggagcaagtcaacgtattacacggatggtagcaggcaaagggagagtttgtgcagggaaactcccgtttttaaaaccatcagatcttgtgagactcattcactatcatgagaacagtgcagggaagatctactcccataattcaatcagctcccatggggtccctcccacaacacatgggaattcaagatgagatttgagtggggacacagccaaatactgagatgtgtcttggtgattactagtaataaagaggagagaaagttgactggtgtagaacgctttggaagaaggtttgtgtgcggctgcagatagccagtttattattttaaacatgacgtggtggttttaaaacatggctgtaaattctttgacacttcattgagaagtgggctcaatatcccctctccttgaatttgagcccgacttactgacttgctcataatataaaatgatgcagcagaagtcatgctgtgtggctttggaggctagatcataaaatgcaattcagctttaaccttgtttactgaaacactagcatttgaagccctgagctgcttcgtaagaagtctgactactctgaggcagccatgctaggaggaagctcaggccacatgaagagtagatttaggtattctggctgactgccctatctgaggtcccagcttcaaccaccagccatgtcagaaaatatgcctccaaaggatttcagtcttcaaccattgagacacccccaggcactgagtcttcccagctgaagccccagacatcatggagcagagataagccatctttgctatgccttgtctgaattctgactgagagggtaattttatatttttcaaagggtgaaagtataatgtttgatcctcacaatgatagtttggcaggttgggctagcattattataaccttcattttatagattaaaaaacaaaacaacaaacagggatttaagcttacctgctttgagattgtatagctaaggtgtggagtgctgacgctaaaatcctgatctttggactccaaagcttatgctttctctcgtttctcatctggatactgtaggactttagaatggcctaaggaagtaaaacaggatatatccagaattttaaggcaaggtcagaaaatgtcaaatgagtagaacgctaagaagaatcaatattaaatggatgagaccagtcatcctgtggagaaataatcatggaagatctgaactacagactgatactgacaaataaggctagaattcaaaatggaaccaatgtgaggataaaagcctttaaaacttttaatgttataaggaagtgttataatgatataacatttttagcagctaattttttaaaaatgaaataggacagttagagaattaacaaaaatcttgccagttgtgtttctgatgaaagggtgatgaaaggggaaaaggtgccatgactggctaatggtgctatttcagtctgcttctaagtatgtccttatagtaaagggtgcttcagattagtttagcttgatgacatcatcccttgtgatcatttactctacatttgccaagccactttttgatttaaatttatttcctcatagaaactttcctacttggaggagaatgtacaatgaagttaacaaagcataccatgttcatgtttttttttttttggagacagagtctggctctgttgcccaggctggagttcagtggtgcaatctcggctcactgcaacctctgcctcccaggttcaaatgattctcctgcctcaggctcctgagtagctgggattacaagtgtgcaccaccacaccaggctaattttttgtacttttaatagagatgaggtttcactacgttggccaggctggtctcaaactcctggcctcaggtgatccatccgcctcagactcccaaagtgttgggattacaggcgtgagccactgcgcccggcctacaatgttcatcttataggttatattttttcaatgcagaagaatgttagtattctcattcatcaagcagcctcacacagcatcctttacctgagagtaagcatcagctcccaggcttacggtgaccctaatcaatatgaagacaccctgtttcagaagtcagtaggacacctttctatttcttgaatcatccaaaatacagtaaggaggtcgctggtgacttcccccatgatgggaagtactaaaaggcagaatccacttagtttttcatgacttcatgtttaggttactttggtgattcactccaggccattgggagcccacagtaattgtttctcattcccgtttctctcttccttaaacttttcttttccaattatttattctttattagatccatgtatttttaataatgaattgaatttcattctgtaattgggcttctcaaagataattgacctcttctctcccaattgttttcatgcgtattttgcagagaatgcttggaatattctgttcatgaaaggcacaaagtacataaaatattttgagtgattttcttcaaaataaaaatgattagttttgatgcttcagatgtctagaatgctatgtgccttgtacaggccctacggcatggaaagtgctcaactgatatttgttaaatgaatgaatctggaaaacgaaaaatacacgaaatattttattcctcaacaatgaagaaaaagctttcagacttccatttagactcgttttaactggctgaattcttcaatgaaaagaaaacacgcgtcgcactgctaatttagctgttcctaaatatatttccatcaaattctgcttggctgtttcaaccttggggttgaagttcttattttgatgacacagagacgttcattgcagtggaaatagcaagtagtattggcttccccgccttcctccctctaggatttcaacttctcctcctcgaacaccagccctgctcttctagtaaatcccacattacagaacaggctgaggacggaggagacaagaggaaagtaggaaaccggagccatggaaacggcggagcggaggcaaagtgtgagagcgcgggtggttagaagggaaaaaaccctccccggacgacggcgcgaaggcgcgcctcagattacgtcacgcaccggggtgacgtcacgaccgtgacacgcgggtgacgccgttgccgcggcgacttctcgtcgtctccgcccccttcccccgctcccccccgcacccccgcctagcgtccttcccccaatcccctcaggctcggctgcgcccggggccgcgggccggtacctgaggtggcccaggcgccctccgcccgcggcgccgcccgggccgctcctccccgcgccccccgcgccccccgctcctccgcctccgcctccgcctccgcctcccccagctctccgcctcccttccccctccccgcccgacagcggccgctcgggccccggctctcggttataagatggcggcgctgagcggtggcggtggtggcggcgcggagccgggccaggctctgttcaacggggacatggagcccgaggccggcgccggcgccggcgccgcggcctcttcggctgcggaccctgccattccggaggaggtgagtgctggcgccaccctgccgccctcccgactccgggctcggcggctggctggtgtttattttggaaagaggcggcggtgggggcttgatgccctcagccaccttctcgggccagctccgcgggctgggaggtgggcatcgcccccgtgtccctctccgtcatgcagcgccttcctacgtaaacacacacaatggcccggggggtttccctggcccccaccccagatgtggggattggggcagcggtggttgagcgggaggctatcaatagggggcgaaactcagggttggtccgagaaggtcacgattggctgaagtatccagctctgcatctctgtggggtgggggcggcggcggcctcgacgtggaggatataggttagttgctggggctgagacaacagcccgagttactgtcgcgtgtaattcttacatggtcgtggggatgatggggctcatcatttcctctctcctctcccggactgccccccttctcagtccgctgccctttttcacttttctatttggggatttctcttcacctgttttacccagcaaattattttgatttagtctttactttttcaatcctaaatcgcagtttccgatgccttttctggtctctggtcctctgttcctaatgtttgtcagcgctctgtcgctgattggtaacccccattctattcccatctaccgcccgctcattttccagttgtcggacctgcctgccttctaaccccagctcccacttaagagcatttttgcacttctcttaccctggtcctcttgaggctctgtacttgatctcaccactccctaacattgttgtctgttgttatcttcacaaatcctcctggacactttggagctacttgttttctgagcccagaagctgtcaagattccatcaggtttcacttggctcttttcgcgcttgcactactggcactttttggctagtcgtccattgtgcattcacacctctttattcctacccatttttataggtctgattgatttcttagtgttgtcctcctttttgtcctatttttttccttttcctttttcctctccagtccttgcttctctcagcctgtttttgcattagtcagcctcttagcactgtgtcaaattatttacgtttttttattacataaaatttattacaaatatttggtattttattacagaaaataatactttattatgctttacaaataagatatggtataataattgtggtttacagttattgattaggtaatgtgacttactctgttgactttgctcgaagttctctttgctacttactattaacatctaatttctcaattctcataacatctcattctctctgcaattttttttttgcatcatcatctttggaaattcatccaatatgcttgctttattcagcatcagcttgtttatgataatgtttgttttctactctttatatcatctttgttacatgcccaaaatgtgttctgtaccatcatttgatctgttctaaaatttctcatttttaagtttcttaaaatcattccacttttcagtatgcatttttgcttagatcagtttcctctcatatctgttcctttcccccagcttcttgatttctaaggagaaagctcttctctacttcaatttcctagtttattctgtttcccttgtttccagttaccattcattttgccttgtttcctggcttttggtacttaactttctgaagcttcctcttttcttctccacacctccacgttccttcttatttataaacatctttgtttcctttgacatggaaatttatttttaggatacattgtttttaatggataaatactaggggtcacatctgctgtctgttttctccaggaatcggatatgcctttgtcttaaccaggcacaggtgcctctggattttattttactctgtaatagatgtgtagttttgttgaattgtatcttgtttgaagactactacagagtggaacaatgagtgaagtaataagtaggggttatgaaattgtaattctctgattataaaattgtttatcttgggaactttgctgcagagttattagaaccgtttgcaattctgtaaagaaggcttttgtgaagtaaaatctctacccttctattttatttgaaagggccagattgtttggaactgtaccccctgaagagtctgatttagtaagtgagagcgagggccatggatttctgtatttggcacatgtcttgagcagttcccatgtaccaatccttgagaacctctaggctagctgaatttaagtataaattgccagtaattggaaagcatattcatatcttctgaaactataaggatactctcattttacttggttaaaaaacaagtgtttcctactgtcctctttacccaggttttaatgtttagtggtgaacagtagttttccctctacatttttttctgaactgataataaatgtatttggctgggagggtgacattgattaaaaaatgtatctcttgaatgtaaatatcagtattacagatgataaaataaattcctccaagaaataattttaaatttgaagttgatattcagtggaaactgaaatgtgctgtggtcttttatttgaagtcttccttacattcacttaaagggatcttttactgcaaattacatggaaagaatgaaaaggtttgcttgtgtgtaatgacacattttattctgaagatttattttacctaacagtaaaatgtaggttttttttttttaaataaaagtttcccagagggaaatttcatctaaaaaaaaagtctgatttcaaagggaaagcaagtcattatcaaaaattagaaaactataagtacaaaaagtaaaaaatcatcagtaattttgccactaagatattattactatagacattttggtgtattccatctgttcttttttaatgcttttataacactatgtagttttgtattttaaaaaacttaaagcaaaaatttctacgtattattagacatactgtgatttatttaactaatcatttttttggggtgttaggttgtttttaattttttactgccatcaaacatcttgaacataggatgtagattttagtctttaaaatatgttggggaatgaacaaatttcacatcctgtatttgtagtattaatactttgtaggtgctcaaaatagaatattctggtaaatgattagtgcttattaaatatttatcaaatgaatgtacttgtacttttggcattaaacattaacatctgaccatttatatttacctgattttttttctatggccatatggtatgaaatagtgtatggtataaattaaccatatggtataataaatacatttttttaagtgtgataccagagtgatatttattaactgttcttcctgtgctgtttctgtagaagggagcttctcacaattgcattagaattacaattttattatgttctgttttcaagatctctgatcgtcagtcttaaactgtttaattataataatgtattgactagggaatattctgggatataatctcctttataatgaggtccactgtattaaaatacatctttgcaagccacaccaggttggattgcatcataaccctgaaaagtggtattctcattaatgcaggtgcttgtgcagttttggctattgctgttaatacttatacagatatattcacaggtgcccttgtggcaaaaatcataaaatagttgtttgtctttggtatttctagtgttcactttctatattcttttctctctccttatttactgaactcccttctttaggcatccactcactcctttttctgtttagaatattatctgtcagtcattttatatgttggccattaaaggaataaactgtcagtaaacagctaagaaaggaatgttggactgggtgcttgaatccttgaatgtagtaaatgtgagtgcaaacttgatttaattgtacatgtatttggataataggccagaaaaattacattagggtaacaggctagaacagtctgacttttcttgtttttctatcccttgctttcttgattagaatgaataggaggtgggtctggatatagcagctggaaacctgtgttccatgagtgatggggaagagagggagggaataggttcctctgatttttggcattttctaagacctgatgcccaccttgtcagagaatgcgatgactacttttgtgttcttccttttccctttttctcccaattataaaattgttttctctttcagaactgcagaagtgcattttgtttctttgacactttgatgttgttaatttagctgaatacctagtgaacattttgtgtcataatccccttgttttatgaaatccagtatggtctagtcaccttacatttctgcctcatattgtccttaagcctttttttgtcagtagctcttactagattttgtcttcatcagaagttaaagtgttttaagtcctttactcattctgtttctctattttaacttacattggttattctgtaaagtcagatgtggcagtagggctggtcgtggtggctcacacctgtagtcccagctacttgggaagctgagatgggagcatcacttgagccctgaagttcgaggctgcagtgagccatgatcgcaccactgcactctagcctggcaacagagtgagaccctgcctcaaaacaaacaaacaaacaaacaaaaaaaaaacaaaaaaacttgcttgtagaacttctgaattcaaaataggtgggcctatttgggagcttttctgtttttaaggtgtcaagtactgctttttaaaatcataaggttatggataacttcatgttagtgtaagaagaaaaatatagcctcatttgttccatttctttcttaaattttttgttttcattgccatgtttttatttttcgatttcaatttttccagcctaaatcactaacatacttaattagcatggtaatcagaagatactctttaatacagtctccaccctaacattaagcaattatttttcccccctaccctctgagattatttttgtgtccatgttttctcttgggcttaaaaaaaaaaactattattctaattccttcctgtatcaagactatgcatatagagggaactcaatgcccagtaacttctttttctgggccctggtgatgtagaatataaaaattgctttgaactcaattaactttatatcttctggaagctctgtaacatcggataaagcgtcgttttcattcttgtaatgtagctgcagttcctgacagcacgtttgggacaaatgtactgtgggacggtggttttcaaagtacgccagagctctaggagaatttttcgaaaacattctatcattgtaaataataattttttttttttttttttttgagacggagtctcgctctgtctcgcagactggagtgcagtggcgcgatctcagctcactgcaagctctgcctcccgggttcacgcctttctgcctttctcctgcctcagcctccccagtagctgggactacaggcgcctgccaccacgcccagctaattttttgtatttttagtagagacggggtttcaccgtgttggccaggatggtctcaatctcctgacctcgtgatctgcccgcctcagcctcccaaagtgctgggattacaggcgtgagccaccacacctggccagaataaaaattccaaattgcactaatgcatatgtgaaactgtttttgtctgttttgtagttttaaaatcttcatctataatagtacctggcacataggtactaaaatatttggtgaaagaattagtgaataaaaccttactggatatgaggtgatctgattttctgtaacattctattctttttttctgccggtcacaaaatcaccttatgaaattgacagccaaattggctgcaacaggcagtttgaaaaacactgttttggggtttcaaggaccttcttcagaggttaccccagggctctgtttagtgcctctataccaggggcccccaacccctgggccacagcctcgtatctaccagtccgtgacctgttaggaacctgactacaccgcaggaggtgagtggcaggcaagtgagcattaccgccaaagctccacctcctgtcagatcagcggcaggagcgtgaaccctatcagaaactgtgcatgtgagggatctagattgtgtgcttcttgtgagaatctaatgcctgatgatctgaggtggaacaatttcatcctgaaaccccctctacccctgtccatggaaaaattgtcttccatgaaattggtcactggtcccaaaaaggttggggagtgctgccctataccataactattgaagttcttcatttatctgctttacatgttagtttccttgaaaaaagggttttatggctgtaaaaattttagagctactatgtatggaagagaggtttgtgctggcataaatcttctcaggtatcatctgtgtagaaaatttcaacaacttgtgtcttaaggcagaggtcagcaatcttaagggtcagatggcaaatattttaggcattgtgggacatacagttcctctcacaattcctcaacaatactgtagtagctcagaagtagctaatagacaatatttaaacaaatgagtttgactctgttccagtagtcattttcaggacactgaaatttgaatttcatatcattttcatgtgtcatgaaaatcttcttttgattttttttctaccacttaaacatgtaaaaagtattcttagcttgtgagctatacaaaagcagatagtgggccagttcatgggctgaactgttctgactcctggtctaagggagactatatatgttatatttgaggttctcaaagtaagatgtaggttagaggtctatagaaagttcataattgcttttgtaaaaactagattgatttatttgagagggagagagaggtggagtttcactgtattgcccaggctggacttgaactctgggctcaagcaatcttccagcctcagcctcccaagtagctaggactacaggcatgcaccaagcccagctcctagttcctctttgcactcagtttcatcttctaccctcagcccctggcaaacactggtctgatctctgtgccctttccagaaagtcatataaatggagtcatataaaagtcatatcagtggggccgggcatggtggctcacacctgtaatttcagcactttgggaggctgaggagggcagatcacctgaggtcaggagtttgagactggcctggccaacatggtgaaaccccctctctactaaaaatacaaaaattagccgagcatggtggtgggcacctgcaatcccagctacctgggaggctgaggcaggagaaacacttgaacccgggagagggaggttgtagtgagccgagatcgcgtcattgcactccagcaattgtgaagcagtggttaaggttcattcattattttacatatggatgtccagttgtttcacatttatcaaatttcttttgaatcaccttggcacttttattgaaatcaattgcttatgtttgtgagttttggattctactgttttattgatctgtgtgtgttttcttaggctaataccccactaccttagttatgatagctttatagttaaatttaaaatcaggtaggtccagttgagaagatttttagaactttgactttttaatttcttgttaccatacttttggaaggagaagactcataattttattcaggttttcaaaggtgtcttctacccccaaatacttaagacttcagtatatagttaatatatctctgtcttgaattatgtggtggtgaggttcatgaaaagtgacaggtaaaagttgcaaccaaaattaatttccttataagaaaggacatattttagtaggttgcacagaaaagtcaatcacgtcctttttaccgtgttgcattatgaggtgtaatcaaaatgtgtataggggaaaatgaatatgttaagatgtttattcaccaaaaaaagtcaccgaaagtgtcaattaggttgtgaaagatactagtttacaatgtgttattctccatcttcattagaagagttcttccatttgaaacctatgtcatgttctgtgatatttcagagttagtatctttatgaatcttaggggcatcattaaatcattatgtttcttctaaggaaaggcatatggtagtagttggtcatatttctacctttttcagtggggcctatagggcccctttactttgttttaaactgcactgatagctttttactggttagcccagggaattatccctacagtgtaaaatgatgtttctcatcatgattttcatttaataatttaaaaacaaaataacaggaaacacatgtttctagagaggaagtgtggaatacctgactagtagagggtcaggtgacaattgcgaaggtagaaactgactaagttttgaccatgttgcaaggagtatcgttccagttttgttgggtcaccttgcagagtttttaaaaaaaatccttgggttttttttgtttgtttgtttgtttgttttggtagagatgctgtgttgctcaggctagtctcgaaatcctgggctcaagcagtccttcccagagtgctgggattacaggcatgagccaccgcacccagcatcaccttgccgattttgaaactacacttccagggagagagtaatacaatatcttggcagactatttttaactattgttccaaaattaatctgtttttaaaaagtaaagaagtgtggatatctttaaaagatactttaattaggcatgcaccaagcccagctcctagttcctctttgcactcagtttcatcttctaccctcagcccctggcaaacactggtctgatctctgtgccctttccagaaagtcaataagtggagtcatataaaagtcatatcagtggggccgggcatggtggctcatgcctgtaatcccagcactttgggaggccaggatgggtggatcacctgaggtcaggagttcgagaccaacctgaccaacatggagacactccgtctctactaaaaatgcaaaaaattagccgggcatggtggcgcatgtctgtaatcccagctacttgggaggctgaggcaggagaattgcttgaacctgggaggcggaggttgcagtgagccgatattgcgccattgcactccagcctgggcaacaagagtgagggaaactccgtgtcaaaaaaaaaaaaaaagatactttaattatatttaagttggggaatacttttgttttatattttttcttgcactaaatatgtaacctttaagttaataacaccagaaaatttttactttatagttttagaactgcttaattgaaataaaatgttaggatactttgaattagtcacttattttggcatattttaaacagtttaatgtactgcttggggttgtttctcaattgacttgatatttttaaactgtattttttaccttgtaccatttattttgcaaaataaatttctattttggcttatagatgtatttttaatattaaaggggattattggtgtcagccataaaattgtaattaagtcttaagtaggtatggtttttttttttttttttttttggagacggagtctcgctctatcatccatgctggagtgcagtggtgtgatctcggctcattgcaacctccgcccccccccccccccgggttcaagtgattctcctgcctcagcctccagagtagctggcactacaggcgcatgccaccatgcccggctaatttttttgtatttttggtagagatgggatttcaccatgttagctaggatggtctcgatctcctgacctcatgatccgtccgcctcagcctcccaaagtgctgggattacaggcatgagccaccgtgcctggctgattatttttatagagctcttgttagcgtaatttctggtaatgttttatggaggtgacttaattcccatcataaaaatatcccatcttttctgtgactagcaagcagttattgcctttataacttttttttaccataaaaagataaagtactattgataattactcctaattaactcagaacttttttgttttacacacattaatatatacttccatgggaatagtgtcagagaacatcaaatagggaagagattatgattcagagtggtctttatattcctattctagagccacagaaaatgttcatctccctttagtttttgcaggattgcctctaacactgatgatattccactcatattcttcctgcacatgccttctcatactaacagtaagtcacacaatctcaaataagtttcattatacatgagaactcagttgaatgcttgcctttcactggcatctcttgatcctcctccccctccttatggtatgcactgaacttctagtaggccatatgtgttaagtagatcataggagtgctatgaaaataaagtgaaatgatgaatatgtaaaagccttcacaaaattatagtagtgttttctgttgatttttaagacaaaagataaatactatgtatgtaaaaatttcctttcagaaatctttgttcttttttttgttttgaatgttcaatatgcttagcacagggctctagttaacacttttggcagttcttaatgtgggactgactgatgattgtcctagaactgtttcagtgttaactacattctattaatgttactttaaaacattatttaattaaagaaacatgaagtggcaacatactgattcatgtgttcagtaagcaattcatgggaaagaggtaagctttcttaataacagtagaaagactgttccatttataggaaaactggtaattatgacttgtgttttggtatttaaaagctgtggttggccgggcgcagtggctcacgcctgtaatcccagcactttgaaaggccctggcgggtggatcatgaggtcaggagattgagaccatcctggccaacatggtgaaaccccgtctctactaaatatacaaaaaattagctgggcctggtggcatgtgcctgtaatcccagctactctggaggctgaggcaagagaatcgcttcaatcagggagtcggaggttgcagtgagccaagatcgcgccactgcactccagcctggctacagagcgagactctgtctcacaaaaaaaaaaaaaaaaaaaaaaaaaaaaaagctgtgattaacatttgctttgtcattcatccaaaactacattggtgacttttgtattgagtcatttcttagggcaacaggtattcatgtattcagtaaatatttgagtgcctactatatgccaggtagtgatctaggtgcttagtagtacacttgaaaacaaaacaaaggtctctacccttatgtagctgctgtccagtggaggggtgtgtgtgtattgggggatggggctgagaaaccttagacatacagaaaggaaattatgtagtatgttcaaaggtaataagtgctgtggagcaatgaaagttaaacagtttagggctgggatgggggtaggtagcaatttaaatagggaggtcagggtaggcctcacttgagaagggggtatttgaacaaaaatttgagaaaggaggaggaggcatttcagataaaccaattagttcaaagattctgtgtcgggaatgtgccttgcctatttaagaaacagcaggaggccaaagttgctggggcaaggtagagactaggggattagggaaggatctctttcagttatctaggccatattggtgatagcagaaatactgagaagtagtcagattttggatgttttgaaagtagattcatcggggcttggtggctcacgcctgtaatcccagcactttgggaggccgaggcgggcagatcacccgaggtgaggagttcgagaccagcctgaccaacatggtgaaaccctgtctctactaaaaatacaaaaattaggtgaaatattgaaggagatgttttgattgaagtgattttaagagagaagaggaggggaagtaaagatggtgaggaattatcctgtaaaggggaacagagaaatggggccagagctagtgaggaaagtggggtcaataaatttttaatgataagaaaaagaagagcgtatgatgataggaatgagccattagagagtaaaacgtttcaggagggagagagaagaattgctgaagcactgtcttagaagaggtaagagggaaagggatttagtgtataaataggaaggattggctttctataggagcatctatactttatgataataggccattaagcagagtatgtggttagaaatgctgctaggaaggtcgacgtgattggtggagtctgtacacgttctgttgcagttgctttggtttttttcagtgaagtaagacttgaggttatcagccgagaatgaggattggggatatgtgaaagtagctccgcagcagtatgggagcataaatgaactggagacaaatagtaaaattaatgggcaattttttttcctttaagagatgggggtctcactctgctacccaggctggggtgcagtggcacagtcatagctcactgcagcctccaactcctgggctcaagtgattttctcacctcagcttcccgagtagccaggactataggctaatggcaatattaagttattttatgagttgtctagacagcattatgagtctcctaactttttggtactgatcttcagatcagagttaaatgtaacttgcccaggcaatttaaacactcaatatgagtcattttcatttggactcaaacatggaatcattgggaaatagaacatgaatttattactccttaatgaagtacctgccactatcctgccatgaatgtaggctaaatttggagtggtctggtaactgcttttcttttaaaaaaattttcttcatcttttctgtatcaaatacttactggtttttctatgtagaataacataatctcatcattactttctttcaaacactctccaaatttgacttgtctttgctcatgtttttcctaccacctgaaatacagatttcctcccccatcccaccctccaaaccttccagacttacctcacctaccgtttattgtaggaagcttttcttaacctctttccaagtcctagtttgatgcctctgctttgtgcttttgtagaatcccagagtttaccttgttttactcactatatcgtattgtggggtttttttgttaataggtatttctttttcctctagacctgcactgttcagtcatactttctgtgatgatggaaatgttcagtgtcgtcttaatatggtagacagtagccgtatctatgtggctactgtgcacttcaaatttgcatagcaggactgaggaactaaattttatttcattttaattaatttaaaaataactagcctgatggctagtggctgctttaatcagtgcagttctagaccccttcaaagtcaagagtgtgtgggattcatacttattctctcgttgcttaacaataatactgtctaatacttaaatgactgaattctttttcggtactcttagtctgcatagttataactcacctagaatatggcagttttgttctctagatttctgtctttaaccatggcttttcagtttgttttcaagattatgttgatttacacagcactgagttcttcagtcctgcgaagttagcgttttggttggatgtggtggctggcatctgtaatcccagcaatatgggaggctgaggcgggacgactgcttgaagccaggactttgagatcagcctgggcaacatagcgagcccctgtctctacaaaaaattagctgagtgtggtggcatccacatgtagtcccagctacttgggaggctgagggcgggaggattgcttgaacccagttcacggctgcagtgagctatgatcacaccactgcactcctgcctgggtgacagagcaggagtcaccctctcaaaaaaaaagtgtattttttcccctttaggactgaaaaaattgggtgttacaagattacctcaaggactggtctgagaactggggatggtaaggaagaaactcaagtggccagcctctggtttgtgggggtaggtgggcaatttctgtttcaaccaaagcagttctacttcataaattaatatattggaattgtgcttgggatttcatttggaggggaaaaaagtcttctaaacaataacactgttaattgaagagacaaagcatgcatatggcagcacgtgattaaccaccaaagtggataacagatcaagaagacatgggaagttgttatgggctagtgaggtcttgatggaagttaaggtttaatttaggtaggtagaaggaagacaaaaggatgtaataggcagtgggaatagaatttgcaaagaattggagttggaaatacatatgttagttttggttaagaaacaatgagctgattatagttgagcaaattgtatgaaataaaatttgacaaaattagatgggactggattgtaggaaaaagtgataggctgacaaaaagtgcactttatattgcatgcaatgagatgaaatactcggaggtattttggttgttacaaagatggaggaagaggacactattagcatttaatgagaaaggatcagggaagtcagccatcccacaatgttcaggacagtttgcacatttaagaattgttccaaatcaccacatgacctagaatgacttgctggactttgatgatgtaggttaaaaaaaaaaagtgatcataatgatgtgagcatagacagtaactccattttgtgtatgaggcacttttttgttgttgttgttgttgttgttgttgttgttgttgttttgagacggagtttcgctcttgttgcccaggctgaaatgcagtggcaccatctaggctcactgtaactgaggcacctttaatatacactaagattttcaggaattcagttaccacaatattggaggaatgttaaagtttttgttcagaactttatcaggagtactccacccctttagaaaatcacgtaattgatggcagtgtcacttgtgctgtattggtgacgcaaatactcttcagtctgcagttgtaactgccacagtcacagtgcttgttgtatatatgtacaaagtaccatcagtgtgttatttattatagtaatagcctaaatattataaaattgcactaaggtagattatctctgaattacatttattttttatttttatttttgtgacggagttttgctcttattgcccagggtggagtacaatggcgtgctcaccaaaaccttcgcctcccgggttcaagcgattctcctgcctcagcctcccaagtagctgggattacaggcatgtgccaccatgcccggctaattttgtatttttattagagacgggggttttccatgttggtcaggcttgtcttgaactcccgacctcaggtgatctgcccgcctcggcctcccaaagtgctgggattacaggcatgaaccactgtgcccagcctctgaattacatttaagggtagtatagagaatgtacaaaatagttgttgtaaaaaggagaaattgatttctgttttcagtattggaagactgggttattcagatgaaaacaattaaaattcttggaaacagtattaaaaaaaaaaaaaaaaaaagaaaacgtagagcagttgcagagctgaaaagatagtggggagctgccaggccaaattctaggaataaacaagaatccaaataaataagtggatgaagtagcttttgccctaaaggcagttgccaatctgtacaagttgggctttggttttggtggaccattggggtgaagaggacagaaatcaagtcctagagttcatctaaagtgacagtcaaaaagaataacctcagttttagatgggaccccagtgactctatcgttaggttaagggtgaaacaactgaactgtctacacactcccatatccatgtgattgcagggaaggttgaatggagcaggaggaggaaaaggaaattaagaaaaataaacctttcaagttgtgaccacagttttagccttcacagtgatttgccttgagggtttgctctgtctgggtggtccagggaccctccatgataaatgaccctccagccatttatcatggttactggtttcagactagtattacttccatggcctggcagatggaaaggcaaatcacgtgtggagaaaggcctttcattctagggaattgcttccagtaatttttcaaggacaatgaacagtacattgtcacaagtaatcaaacatagtaaaaataaaaaaattagcaagcaaaattacctgagagatatataatatgtaatatatatgtagaattctttcagcaatgtaattaaaatttgtgtgggtttctttatgtatatatacctaaaattacgtttttacagaggaaaaataataaccaagcatgcatccaattggcactgtgaataagaagagagcagaaacagatctataaaatcttcaaatgttgcaaatatcagatggatttaaaacaatcactgttaaatttaaagaattggagacaaacttgaagaacaaaagactcttataaagtgacttagggccaggcacggtggctcacgcctgtaatcccagcactttgggaggccaaggcaggcggatcacctgaggtcaggagttcaagaccagcctggccaacatggtgaaactttgtctctactaaaaatacaaagattagccacgtgtggtgaggtgcacctgtaatcccagctgctcaggaggctgaggtgggagaatcacttgaacctgggaggtggagattgtagtgagccgagatggcaccactgcactccagcctggcctataagagtgaaactgtgtctcaaaaaaaaaaaaaagttactttggttcatgcctgtaatcccaatactttgggagactgaggtgggagggtcacttgaggccaggaatttgggacccgcttgagcccaggagtttgaggctgcagtgatgtatgattgtgccacactgcactccagcctaggcaacagaatgagaaactgtctcaaataaaggaaaaaaaatggctgggcacggtggcttatgcctgtaatcccagcactttgggaggctgaggccgacagatcacgaggtcaggagattgagaccatcctggctaacacagtgaaaccccacctctactaaaagtacaaaaaattagctgggcatggtggcaggcacctgtagtcccagctattcgggaggctgaggcaggagaatggcgtgaaactgggaggtggagcttgcagtgagctgagatcgcaccactgcactccagcctgggtggcagtgcaagactctgtctcaaaaaagaaaagggggggaaaaacccaacttaatagatttgcaaaaaaccaaatagaaattccagaagtgaacactttaccaaatatacctaagagattatgcctagctgaagaaagagttcattgcctgggagacaaggcagaagaaactgtttagagtgtagcacagaataaaaaagaaaatattgaagagaggtaaagagacatggaagacagaataagatctaatttctttaatcagagctctggaaagagaggagaaagaatggtacagaagtaatatttcaaaagatatttctggctgaaaattttatagatccaatgagaaaccagttgattgatttaagaaggttaatgaatttctagcaatataaatagaaatctacacccagacaaatcataggaaaactgcataaacccagatacaaggagaaaagtcttgaaagtagccagagagaaaaaaagatgtttttcaaagaagcaactatggactgatggttgacttttcaatagaaaattacatatattctcaaaataactgccaatctagaattctgtaattagcaaagaattatccctctacaatgagggtaaaatacttagttgaacaaactccatcagctctttctaaaggaaattatgaagtatacattaatacttaaggcagaaagattctagataaaagtctgaggtgcaaaatggaataaagagcaaagagagtggcaaatatgtggatgtattaaaagaaacgttgactgtataaagtactagtaagaccttaattaaaatatgtgacaagaagctgggcatggtactttgagaggctgaggcgggcagattgcctgagcccaggaatttgagaccagcctgggcaacatagtgaaatcccgtctctacaaataatataaaaattagctgggtgtggtggtgcatgcccatagccccagctactcaggtggctgaggtgagaggatcgcttgagcccaggaggttgaggctgcagtgatccttggtcgtgccactgcacaccagcctgggcaacagactgagaccctgtctcaaaaaaaatatatgacaggcgaaggccgggttctaagacctttgtattgtcagagagaaaggtagaaagtattaattgacttgaccttgataaattatatgttttaatttctttttttttttttttttttttgagacggagtctcgctctgttgcccaggctggagtgcagtggcgggatctcggctcactgcaagctccgcctcccgggttcacgccattctcctgcctcagcctcccaagtagctgggactacaggcgcccgccactacgcccggctaattttttgtatttttagtagagacggggtttcaccgttttagccgggatggtctcgatctcctgacctcgtgatccgcccgcctcggcctcccaaagtgctgggattacaggcgtgagccaccgcgcccggcctatgttttaatttctaagttatcttctaaaaatgtagaaaccagacttttaacttctcaaccaacagaagataacaaatgattaataaaaattaatcctgaagaagtgaagaaaagaaagaaccagtaggacaagtagcacaaagatgggtagatttaaatctaaacatatcaccagctacattaaatacaaaatggattaaattattcagttaaaagccaaagattgttacactgaatttccaaaaaaattcagttatatggggtttataaggaacatatctgaaacctaagaataaagaagatcaaaagtaatcatcacaataagacataccatgcatattctagcagacagtatggtacagttaatatcaaaggtggacagtaaggcagaaagcattattggcagaagagtcacctcaaatgataaaatgaccaattcactgtgaagatttaatagccttagtaatatagtataacctgaaatatagctttagaatatttatagcaaaagttaaacaaaactacaagaaatagacagatttctcagtcttaatggggtatttttaaacagctctttaagtaactggtataagaagcagacaggttagttaggatataaaatatttgtataacacaatgaacaagtttaacccagtgggtgtatagaacccattctacccaacagtggcaggctacacattcttttcaagcatgtaggattttggggggaaaattgactgagtaataatgttgtaaaacaagtttcaacaaatttcaaaggattgaaaccaaaaaagcatttttttctgtccattttcattaaagatctctatcaatagggtaatttttaaagcttcatgttagaaattgagcaactattaatacttggaaataatctggtcaggcgcagtggctcacacctgtaatcccagcactttgggaggccgaggcaggcggatcacgagggctggagttcgagaccagcctggccaacatggtgaaaccccgtctctactaaaaatataaaaattagctgggcgtggtggtgcatgcctgtagtcccagctacttgggaggctgagacagaagaattgcttgaacccaggaggcagaggttgcagtgagccgagatcgtgccattgcactccagtctgagagagcgagactccctctaaaaaaaataataatccatgcatcaaagaagaaatcacaatggaagttagaaaataccttgaactagatgattaaaaatttttgattgatcaaattccacaacttgatatatcttagaccattgaaagtgagagaatcaaatgttatgtctttagatacgaagtttcttgacacccctccctgcctcccccaaaaaagaaatacctaccacctatgaaagattcttgattggaaaaaaaaaaaataactgagctggagtttcattaaacttctagatctactgggaaattcacagtcatttgatctttcaatgagtcataattgttttgctgtggatggtcttgcctcgatgttgatggctgctggttcatccctggtggttactgaaggataggatggctatgccagtttcttaagacaacagtgaggtttgcgacatcagttgacttcttttcacaaaagatttctctgtaccaggcgatgctttctggtagcatttgaaccacagtagaactgcttttaaaattagagtcagtcctctcagatctgccagtgcttcatcaactaattctatgtaatattctaaatcctttgctgtcattttaacagtgtttgctcacagcatcttcagcaagagtagagttcatgtcaagaaaccactttttttactcatccataagaagtaacttcccatttgttcaaatttcatcatgatattgtagcaattcagtcacatctttaggttccactcctaaatgtagttcttctgctgcttctactacacctacagttccttcctccattgaagttttgaactcaaagtcatccatgagggttagaatcaacttcttccaaactcctgttaatgttgccagttttacctcctcccatgaattacaaatgttctttatggcatcgagaaaggtgaattctttgcagaaggctttcaattaatgttgcccagatccatcagagtaataacgatatctatggcggctatagcccaatgaaaggtacttcttaaataaggaatgttgaaagtcacaattacttcttgatccatgggttgcaagatttatgtgttagcaggtgagaaaacgttcatcttcttgtagctctccatcagagctcttgggtgaccaggcacattgtcaatgagtagtaatgtgttagaaggaatctttttttctgagcggtgggtctcaacagtgggcttaaaatattcagcaaactatgttgtaaaagaatatgctgtcatccaggcttcattgttccatttacagagcacagacagtaaattttgcagaattccaaaggccctaggatttttggaatgataaatgagcattggcttcaacttaaagtcaccagctgcattagcctctaataagagtcatcgtgtcctaggccaggcgtggtggctcatgcctgtaatcccagcactttgggaggccgaggtgggcggatcacctgaggccgggagttcaagaccagcctggccaacatggagaaaccctgtctctactaaaaaaatacaaaattagccaggcatggtggcacatgcctgtaatcccaggtactcaggaggctgaggcaggagaatcgcttgaacccgggaggcagaggttgcggtgagccgagatcatgccattgtactccagcctaggcaaaaagagcgaaactccatctcaaaaaaaaaaaaaaaaaaaaagtcatcctgtcctttgaagctttgaagccaaccattgacttagggaaatgttgtggctggtttgatcttctatccagatcactaaaactttctttatatcagcaactaggttgttttgcttgcttgcttttcttaaactatttttcttttaattcttagagggtctcactgtgttggctaggctggtctcaaactcctggcctcaaagcaatcctcccaccttggcctctgaaaatgctgggattataggcatgagccgtagtgcccggcctgttttgctttcttatcattcatgtattcactggagtagtgcttgtagtttccttcaaaaactctgcctttgcatttacaatctggctgtttggtacaagaggcctgcctttcaacatgccttcttcactaagcttaatcatttctagcttttgatttcaagagagagacatgtgactcttggtttcacttgaacacttagaagtcattgtagggtttttaattggcctaatttcaatattgaaatctcagggaataggaggcccaagaaggggttagggcagtagctggtcagtggagcagtgagaacacacacaacatttactgaagaagttcactgccttatatgggtgtggttcgtggcaccccaaaagaattacaatagtaacatcgaagatcatagaacactaaaatagacagcataataatgcagaagtttgaaatactatgagaattactgaaatgtgacagagacatgaagtgagcatatgctgttggaaaaatggtgccaacagatttgctcgatgctgggttgccaccaaccttcagtttgtaaaaaacaaacaaaaaccattatccgctaagagcagtaaagcaaagcacaatatgatgaagcatgcctgtacagtttatacttcacagtcattggttaaatttactcattcctttaagcataaaaaataaatatttagcacctttgtgctgagttgtatgctaggcactgggatatagaaatgaatgatagtttgtcttcaaggagcttacagttaagtggtagaagtagataaataaagaattaaggacagtgtactgtgatgaaagtgtgccccagatgcagaagaatcacagaaaaggagcacaattcaatatgcttttaggggatggaagacagatttcctaggaaaggagatacttaaactgaattttaaatacttcagatatacaaaatctttataaagaagagtaattaaaccttatttagagacagaccacctaaataaatggtacataccctgtactgagtgtggattggaagactgagtatgttaaaaatgttagtatttctcaaattgatagtggatttattgaaatccaaatgcaaattcctgtaggtttttctatggaacctaacaacctgattcaacaatttctgtggaagctttaaagaggcaagaatagccaaaatatactttaaaaacaataaggtaggaagacttctttaattcctttttccactcggcaaatttttaatgctctatggtaggcactgctcatcctggttattacctttgtgaatgtgagatctggctcccacccaaagctcacattcagatccacttgtagtggtatctagggttttgaatagaacacttcctgaaatacaggttaagtactgggactaccaacaaacaaacttacaacactaattttattatctcatatttgtatttacaatttttcttgatcatattttttcatacaaactttaattagtttctattaatttcttttaacataggaagcttagaaatagacacactttgcttataatagatctttaatattatgtcagttggactatggctttgttagaaaaggagaggagaatctactgctgagtgctgtccaaagagcagttacccaactgagcagagagggaggatgaccttgagggtctcacaggcatgggtttttaggcccagcctgtggagcgtctgagggacttataaaaggaaaagggacccaggtgcagtggctcatggctgtaatctcagcactttgggaggccaaggcggttggatcacttgaggccaggagttcgagaccagcctggccaacatggtgaaaccccgtctctactaaaaataccaaaattagctggctgtgatggtgcacgcctgtaatcccaggtactcgggaggttgaggcccaagaatcacttgaatccgggaggtgaaggttgtggtgagctgagattgtgccattgcattctagcctgggcaacagagcaagactcagtcttaaaaacaaacaaacaagcaaacagaaaacaacagaaagaggagatgaataacaaaatggcaggtaatactaaataatatggatgaattttatattcttacatatgggtaggtggagggacacctgctcttgtggcagattagttgggaaaggatacacttgctggaacaatgcctaccatattaaataaatgaagctagacttccccatctgttatgcataaaaatcaatttcttgtaggttaaagattcaatacaaaaggggaaaccctgaaagcttttagaaaaataaagggacattatttaaggcagagaagaatttcttaagactcaaaaaactagccataaaaaatggacaaatttgactacattgaaaatagaaacttttttcattaagccccattaagacactcaaaaggcaaggcaaggaatagaagatacttataacacacactattagttatctattgttgtgtaattaccgaagacttagcagtttgaaataacatttctctcacagttctgtgggtcaggaaactgagagtggcttaattggatgtttctggcttagggccttgaggctgtaatcagtcaatggctgcagtcatttgaaggcttgactgctttgtgctccctcatgtggatgtagcaggcctcagagctggctttctagaagggagtaagagaaaacacccaagatggaaaccacagtattttagtcttggaagtggcaccccatcacttctgccatattctttttgttagaagcaaggcaataactccagcttacattcaaggggagtttgtacaaggcaccaccaggagggtgaggatcattgggagccagtttagaggctacctactacaacatgtaaagaatgaactggtatgaaaaatatacataaaaaattcctatagatttctaagacaaagacagaacaccaaattggaaaaagggcaaaaaatcctgagcaggcatttgaattaaaaaaaaatttaaatgattaataaacatatgaaatgacccttaatctagttaacaattagggaaatagaaattaaaaccacaatgagagaccatttcatatagattggcagaaatgaaaaaatctgacaatattaaatgttggtgaggctatgaagcagtctgaactgtcttccactgatggatgggaatgtaaattggggggaaaaatcctttggaaaataataggatatcctataaccagcaataccactcactcttaggcgtttgccctagactaatggttcttgagtatgcatcaaagtcatctggagggcttgttaaacccagctgttggggctacccttagagtttctgattaagtaggaattgggtggagcctgatagtttgctttgcatttttaacaagttcctgccgggagtgggctgaggggtgggggggtgggatgttggtgctgcttgtccaggaatcatactttgagagtcagccattgctttagacatagagaaatgtgtgaatatatgaagtaggaagcatatatataagattgctcataacagtattattcatattaaccccaagatagaaaaaaagttcaagtatcctcagtagtgcagtagatatcattgtgtgtttacttatggaacaaaaaactagttcaaatagctaaggaaaaaaaccacactacaaacagctcctgcctgcatcaatatgtatgaatctcacaaatacattagtcataccttagaaccaagtcacaaaagattaagtgcaacatgattctattcgtaaacagtttaaaaacaaatgcagttaactgtattgtttaggaatacaaatataggtactagaattataagtagagatactagaattataagaaaaatcaagggaataatgatgataaaagtgagtgatagtgactacctcagggaggagagaaagtggatgtgattaaggacaaatgggagacttttaagataattggcaatgctatttcttaccttgggttgtggggtttgctttacagttatgctttaatggaacgatgttttgcaaacttctctacatagctttataataaagggaaaatttatctcatttaattttcatctctgattactagtgaggttgagtatgttttcatatgttagcctttgggttttttcttaaattgtttatagacatgccatttgtagattatgctatttgtttttagaacttatttttaggtattctgttatggatagtcttctttatccatcatatgtcaaatatttccttctagtccttttttatttgtatttttatttatttttatttcttttttaagaggcaggcctcccactctattgaggcctaggctatggatagtcttctttatccatcatgtcaaatatttccttctagtccttttttatttgtatttttatttatttatttttttaagaggcaagcctcccactcttttgagacccaggctggagtgcagtagtgtgatcatagctcactgcagcctcctgggctcaagcagtcttctagcctcagcctaagtaactgggacaaatgcacaccactgtgcccaactaatttgaaaaagaaaaaatttgtagagatggagtcttgctgtgttgcccaggctggtctcgactcctggcttcaagtgattctcccaccttggcctcccaaagtgctgggattacagacgtgagacactgttcctgccctagcctttccttataaagacatatgttgttgttactgtttatgtggtcagatttagcagtcttttcatttatttatttattttgattttgattttgatttttttaagaaatctttcctggctgggcgcggtggctcacacctgtcatcccagcactttgggaggccaaggtgagcagatcatgaggtcaagagattgagaccatcctggcatggatgaaacatggtgaaaccccatctctactaaaaatacaaaaattagctggacgtggtggtgtgtgcctgtagtcccagatactcgatagcctgaggcaggagaattgcttgaacccgggaggcagaggttgcatgagctgagattgtgccactgcactccagcctggcgacagagcaagactctgtctcaaaaaaaaaaaaaaaaaaaaagaaaaaagaaatctttcctatccagagttaaaagcatattctctatattgtcttctgataaattgaaaattttaaaaattttgtttaggtatttaagcagtctagtatttgttatatgaagatgtcttgggggatgttattttcccaacaccatttgtacatatgtgcacagtctttttctcacttatttgtaaagcaacctctcatttctaccagattcccatggaccgatttctgggctacttcttaacctgtttgtctataacctgtttgtccacattactactttatatctttggttttggtaatgccagtctcttctctttgtttatttgcggcaaacatatgctcattcactcttccacgtgaccattagaagaattagattgtcaatgtcctctaagtctaggtatttggttaaaaaaaaaaaaaaagaattaggttgtcaaattctgtaaaaagtactattgggattttcattgtgattgcattaagtttatatgttaatgtagggacatatatattagagatttattatgatactgagttttccaattcatgaacatggtttttatcttcatttgtttataggtctcttccccccccacccctttttttttttttttttttgagatggagtctcgctctgtcacccaggctggagcacagtggcacaatcttggcttattgcagtctctgcctcccatgttcaagcagttctcctctcagccttccgagtagctgggactataggtgcacaccaccatgcccggcttatttttgtattttcagtagagacggagtttcaccatattggtcaggctggtctcgaactcctgacctcaggtgatccacctgcctcggcctcccaaagtgctgggattacagacgtgagccaccgcgcctgggccatgtgtttctatttttagtagagacaggatttcaccatgttggccaggctggtctcaaactcttgacctcaggtgatccacccgcctcagcctcccaacgtgttgggattacaggtgtgagccactactcccagctctgtttttttttccttaaaaggtttatagttttctacataatgttttcatccttttggatgtggaggattggtattatttgcgagaatctttttgtgctgttgtgaatgagatgtttagaaaaaaatatatttttttactggatattcatatacagaagaatgaaactagacccccacctctcaccctatacaaaaatcaactcaaaatggatcaaagacctacctgtaagacccaaaactacaaggtgaaaccacagtgtggtatcatctggccccaggtaggatggctgctataaaactgtagaagacttgggaaatgcaaatcaaaaccacagtgaggtattgtctcatcccagttagggtggctgttataaaaaagacaaaaaattaaaaatgctggtgaagatacagaggaaagagaactcttggacgctcttggtgggaatgtaaactagtacagacactgtatcagtatggaggttcctgtgatctagcaatcccactactggccgtttacccaaaggaagggaagtcagtacgtcgaagagacatttgcatccccatgtttactgcagcacactattcacagtagccaagatatggaatcagttcaacaacagaagattgggtaaagacaatgtggttgtatagcatccgatggaatgctattcagccgtaaaaaggaaaaatcctgtcatttgcagcaacatgattggaactggaggacatcacgttaagtgaaataagccagcaaaagaaagttaaaccctgcatgttctcactcttatgtggaagctaaaaagagttgatttcatagaagtaaaaagtataacagaggatactcgggctgggaatagtaggggtagagtggaagctctggggagatttattcatggatacaaaattacagctagataggaggaataagttctagtgttctgtagtagtatagggtgactatagttaataatatatagtttcatatagctaggaggaggatattgaatattcccaacacaaagaaatgacgaatgtttctcctgtctttagtgagaatgcttctgttatgcttggtgacttacagactttttatagataccctatatgaagtttaagaatgtttcttccatttctagtttgctgacagttgggcatttttaaaaatcctaaatggttgttgaattttgttagatttttttcgtacatttattgaggtgatcatgtttttttcctacattgatctatttaggtaagtaattgtattggtagacttcctagttttgagtaagcaactcttgtgtcactggatacattttattgtatattcttttaattgattgttgaattaggtttgcctaattcaggtttttatttagggattttacgactgtgtttacaagtgagctcagtctatacctctctgagctgttccatggttttggtatcaagagctgattcgttttctagagttttctgtgattttggccagtttttatatcagaccaaagaaaatgtttctcgaaagtaagttcattaggctttaagtaaccactgggcccattctttgactttcaacttttctgagtgagttttagatgtggatgttatatacagcatttgttcagggctttggtttgtgagctgagtttctttttttatttttttaatagatgagcttatctcatttatattttgttgataaggcagttcttccacattattaattatatttttctttgggggctttgtctcttatgggtatgtgtgtgtttcccatctaatagtttttgatgattttttataaatcttattctcttactaccttcatagatttaatatctgtaagcctccatttcttgatttgtgaaaataatcaggactattttaactccttgctaataaaggtaagaaaatcagtacacttatacctccctttccccagctaccattaaaaaaatttttttccatctcttcatatgagatataaaccttgtcattgaaaaaaatgcatttattttttactttatccttaagtctcagagttacatgtttgaatgggattaatattcacctttaattctttaaaaccatgacttcttgatttctaattctgttttatttatcttttcatcagcttgattttcctatcaagtagttctgttttttctgccaagaatggcttccttttttcttcttcagccatttctttctgtttccaccgtggccttcatttctgaagtggtctttttattaccttccatttctttcttgaaccctgctaactcacttttcatttcctatttcttttttttgagacagggtctgggtctctcactcaggctggagtgcagtgttgtgatcttggctcactgcaacctctgcctcctgggctcaagccatcctcccatctcggcctctcaattagctgggactacagacatgtgctaccacacctggctaattttttgcatttttttgtagaggcagggtttcatcatgttgaccaggctggtctcaaattcgccttggcctcccaaagtgctgggattacaggagtgagccactgcctcctgcctcatctcccatttcatctgttcttcaattttgttttttcagtcatttttttcccctaaaatgcatttgatagtgatagatggggatatatcagagacttcttttgtttccttgactaacttctggtgtttatctgtctttgcctattatgtttcttctctcatcccccactccctgttttattggtggtgtggcgggtggggttgttaacgtttctcctcatagaccctttgctggattgtttctttttattactcatccttgttgtctttgagtagagtacttctatttgagcctgctctttgcttaagaatgttatggggggctgggcacagtggctcacacctgtaatcacagcactttgggaggccgaggtgggcagatcacgaggtcaagagatcgagaccatcctggctaacatggtgaaaccccgtctccactgaaaatacaaaaaattagccaggcatggtggcgggcgcctgtagccctagctactcaggaggctgaggcaggagaatggtgtgaaccctgggggcagagcttgcagtgagctgagatcgcgccactgcactccagcctgggtgacagagcaagactctgtctcaaaaaaaaaaaaaaagaatgttatggggaacagcagggagaataagcctaagcaggcataacttttttctcagacatcttgtctcagaaagctcgttcaccaaatctgttgtgttctctaccctgggaatacatcactcctccatttttaatgtcttttttccccttcctgccattttgggccaagccaatcattcagtcaggatgaagactccatccaggcaggagatgggtgaggctgatagtgaagttggacatcaaatagattcctgttcgatgatttgatttttaatttgttctgctcagctgcctttagcttttaaccttttatatcttatgttcaatagttattctcacaaaggaactggttcccaacataaatttaaaattaaaagtgatcagttctctcctctagcaaactgtaactgcttttattttatgtgacttgatctgatgtattgttttgttccctggatcatttaggggtggggaagtaaagacagggaggtctgtgtttcactttaaaaacaaaatctaaaccagataaaaactcgtaaaatgtcatatttcaggtcctctgtgatcttgccctttcctacctctctacccctgcccacgtctatcagccatccttgctgtgtactaaatgctctagcacagtatttcctaaagtttatattgtggatactgaatattcaaagtgttctcccaaagataggttccatagtttacaattttgggaaactttaaatgttcctccttgtctaacctgttgagtttctaagctcaaatgaggggggatactgtgttatctaaatcttatttgatttctgtattttacatattaagggattcatctaaaaagtatctgaattgatttggcaagcaggtgataccctgtactatattatatagctccccttttgggatttcataattggatattagcatagtaatggttgagaagaactgtagtaaagaagcttacctttgttgatttattttttttttttgacacagattctcgctctctcacccaggctggagtgcagtggcacaatctcggctcactgcaacctccacctcctgggctcaagcaattctgttacccttccaagtagttgggactacaggtgtgtgccaccacacctggctaattgtttttaaatatttttagtagagatggggtttcaccatgttggccaggctggtcttgaactcctgacctcaaatgatccacctgcctcggcctccgaaagtgctgggattacagcattagccactgcacctggccttacctttgtctaaattagaattgtataaacttccttgactatggaacattgcttgtgtgtagtatatgctaatattctttgaaacattttagggaaatgctgtttaataccaatcaaatccttgcattttttcagggttgtttcctgttgtttctggccctttgtcctagaatgctctcttccttcattttctccataccacccaattttttttttcaatggtttctgaggtgatacttaccctgctgggaggcatttggaaatattttgattgtcatgcctggaggatgctatttgggatttaatgccctcaaatcgaggaacacaatgcactaaaagtcctacacagcaaagaattgccccacccaaaatgccacttctacagtggccctccatatctgcaagttctgcatcctaggattcacccaactgcagatcaaaagtattaggaaaacagtaaaaagtaatacaataatacaaatacaagataatacagtataacaactatttatataacatttacattatattagtcattataagtaatctaaagatgatttaaagtatatggaaagtaagttatatgcaaataccctccctttttatataagagacttccgcatccaaggatcatggtgttgtagggtagagtcctggaaccaatcccttgtggatatggaggaatgactgtatactcctttggagaacactgaactcagcaacttttactcatcctttagaatttagttctggttatcttttccaaaagctttctctaagtacttttgttttcccctctaccccacaccctctcattttctctgcgtggtactctcagagtattttaggcacatcttgattatttgaagtaaccactttgtagtataggagcctataactgtatacctctactgtactgtgagttcaaatctttgagggcaaagacattttgtatccttggtatatgatatataattagtcttttaaaaagtgcatgttacatgaatacattaataaataagttgtacttttactttaaatcagaattgtggtatgactcttaaactgttgcttagactgcattaataatcttgtgcaattgtggaaaataatctcattttactctcataatagaaaattaaaatatgcttccttttgctcagatatgggtgacagctgttagagtagtgttttatttgggttttgaccttgcctgtacatcagaagcacctggagaacttcagaaggtacagatgcctggggccctgcaccagaggttctggtttttgagggtgaggccttggtatctggatttttaaaagcttccaaggtgatttttaatctgaagttaagattgaaaagtcatttagtgagacactgatatgtagcattttgggaagtcagtaaacttaagagtgagaagttactaaatcattgaagaacagtgaaaggagtagggagttttagcttagaaaaaaaaaatctagatggagtatgtgagttctctgagggctataggaatttgtccgtcttgctcaccactgtatcctcaactcctagcatgagcctgagcacatacagggatttggtagatatttattggctgacagaagaatatgtatcattaggtgtttaaaagatagtcattgtagaaccacagagattatccccaaaaaagttttatagtaataatgtgccacttaattttatgattaaaaataatgaactggatatttaattcatttatcatttcagtttattatttactttgtgccagtcactgaggattccatttgattctctggtcaaatctatgaagtttgtatcattcaaataatagggctgtgtcaagaaactgacacttgggggttaagtaatttgcctaaggttacaaagctaagtgacaagagctggaattcttaaagtctgtactcttaactgctatgccttaccataagtcttcaccacaaccctaagagttagatatggtttagaaaggttatgcagcttgcctaagggcacattgcttgagtggaagatttgggacttggacccagacattgtgacactagagtccatgctgttaactgccatgctattggaacccccaaccccctcgcttcctattgtataatgtacaaccatctgttttcatgagattattaaccacagtggacagcttgtgttgctctccttataccttttggcatcctcactgacttttgactgatgggttgaatttggattattgtcttgaatctccttagtaccctgggctgtggtagtcctagaaaataaaacatttctttactaggttctttttcttcatttctttttccttttagttaggattttaaattagaattttaataaacttgcttgcattaatacactgatatctgttagcttctgttattttaagtcggtagtctccagacttaaaaattttgttctctatcataaaaaaaatttgagcacattacccctagtagatatctgttttatttatgctatatgtgtactactgaagaaaatggtaatattttaaaaaatatgaacttgttagcatgaatttttttaaagctaagctaaaaatgaagtgagtttaaaattatgaagggtttttgctgatgtttcaagtttagctaatgtttcaagttacaacataccattaggccaaggttcgttattataatagtgtgtacaaattcatattttaagtagcctggataatttttttaaaatagctagtttcttgtcagaaattaagtaacctggataattttttaaaagccagtttcttgtcagagattattagattagggtttctcaacattggcgctgttgatgttttgaaatggatgtaattcttgcttgtagggttatgatctgcagttgagtgaatcctacgatgtagaacttgcagatatggagggccactgtaaaagtggcattttgggtggggcaataatactatgtattgtaggatgtttagcagcttccgtggcctctgctcacaagatgccagtagtacccccaagtagaaacatcaaaaatgccgggagacatttccaaatgtcttgaggggcaaaattgcttctggttaaggaccactagattagaattttttttttttttaagacggagttttgcttttgttgcccaggctatagtgcaatggcgcaatctcggcccactgcaacctccacctcccagattcaagcgattctcttgccacagcctcctgagtagctaggattacaggtgcccgccaccgcacccttctaattttgtacttttagtagagacagggtttctccacgttggtcaggctggtctcgaactcccaacctcaggtgatctgcccgcctcagcttccagagtgctggtattacaggtgtgagccactgcacccgcgctagatcattgtttttatcctgtattatggatgacaagcagcttgtagtagagtagggaaagtgttaactttgattttttcccctctagcagcaataatgttttcttcagtatgaagtttgagatctgtttgtaggaattaattttaagtcacttgtccattctataaggtttagttaaaacttggtaacataatccatacgtttacttaaatcaatatatgtgagtcatagtatgtcacaatgagataaatgcaagaggagagccactgtcaagtgttctgcagtatggaatgcccagccttcagcagacctcttgactatatgtgtcacatctctgatactaaccctaagttagggtgcctgtgtaaatattaaatgctgaggccaggcacagtggcttacgcctgtgatcccagcactttggaaggccgaggtagacggatcacaaggtcaggagatcaagaccatcctgactaaacacagtgaaaccccgtctctattaaaaacgcaaaaaattagccaggcatggtggcatgtgcctgtagtcccagctacttgggaggctgaggcaggagaatcacttgaacccaggaggttgcagtgagctgaaatcatgccactgcactctagcctggatgacaaagcgagactctgtctcaaaaaaaaaaaaaaaattaaacgagcatggtggcatgcatctgtagtcccagctacttgggtggccaaggtgggaggattgcttgaacccaaaagtttgagcctgcggtgagctgtgatcacactactgcactccagcctgggcacagagtgaaaccctacatctcaaaaaataaatattaaatgctgactttttctaagtttctagatgaacacattaactaaataatgtagcctacctatatccccaaaaaagagtcttcctatgggccctcaggtgtatgtgcatacctattttgtaaaccacttgtttgaccatcacattgtaacttattgttcaatttgtgtcactgcagccatattacccaaaagggaaaagtaattttagctctctgaactgacctccacctaaccaactcatcaggttaactgatgttctccatttcaaaaaatatttgcggtcagattaggtgtgaatcatatttaaaggaagattgttggtcctatatcaaagattagagaatgaatgttcattttacagttttaagttaaaatgtttaaggacagtgtttaccattgcacatgattccctgatttaactgaccttttcagttaactagccactagacataattacattgactataggggcttcttttgtgccacaccagtgttggaattgtgttgatttacttgtggagttggaactacagtttctctcagcagcctgcttatctggttgtttaaacttgtagctgaattattatacaaagttttcaaactttctgttttggaatggtcagttactcaaaactgtggcttcctccttgctaccttacagggtagttgtgagagtattcctcaacaatagttcagactctcattacttcttgtctataattgtagcatgcttttaatgggattccctgcctccagtacctctctggcttgttggttaacataaacattattgccagattaaacatcctaaagtataatgtgtaatcagatcaaaagccatttataacaataaaaactacattaaaaaattacttatgtcctgggcttagatgtggtctctgcaatcagatgttcattaaacaaattatttaaaaaatacatacatacacacacacgcaaattctgaattgtgatatgtgccaaaagaaaaaatggggggtgatgtgagagctcagtgaggatcaaatatagattgggaagaagggtgatgaggaaagacttctttgagaaagtgagatttaaactatctgaagaagctgtgcttagtttagaaaagtgctaggcaaagagtgttccaggaagaaggaatagcatgtgtgaaggctctgctctgctgctgaaattgtggttcagtttattgagtatggcatagaatgaatagtgcctgatgaggcaggaggtaggctgggatgagatcttttcagatcttgcactctgtactaggaagtttaggttgtattctgagttactggggagccattaaagggtttaaggaaggggagtgttgtgaatcagttatgtgttttgcagattctactctgactacagaatggatgagagcagaatgggagttagagcaaaagaaatgaggaaaccagttagaatgcctttgtaagtagtaggtcagagagaaaggatgataattttgactagagtcatgacagtaaacaaggtaacacatgaagtgattatgtcataaactattaccattaccctgtgaaggaagtatgagcagaataagatttagaataaacttattccaagcccatctaataaagggtggtgtgaggaactgaaacaatgggtgtttcaggacattcggtccttgtctctaaaataaaatccaaactctgttgaagatttttcagcctactcttattatctttgtcttctcctaaactcttactcacctatgctataatcataccaaactattacagtgagtatcatgaacatttcctgtaccttgatgccactgatgattgtttactatggctggaatactcttactcccacatacacttaacaaaaccctactcattgtttaggatccagatcaaatatgaatgaagccttccaaatttgcctccagattgatattgcccatttatcttcttttaaccatagtagttcatattactatcacattatagtatattattcaacagatgtctatgtaattgattatgtgccaggtactatgtgtagacattatggatatatccacatacaaaaatagacacagttgccgcatttgtggaaactacattgtaacacagaccttgaacaaaatctgggcacaaatatgtaactaaatgttaataagaggtatgaaggaatacctgcaggtttctgaaaccctaataaggcccttgaggtcaaaattattttcataatcctactaagatactatttgccttttcattctcgttcttgtgagtatgtagtagttataggatgtatgatattccaacaaattgaatacagaaggtgggagaatccagatatcttttgttaaggcagacattaaagaaattggcaaaaaaaaaatttttttttttaaagccactttggggccaggtgcggtggctcacacctgtaatcccagcactctgggagtctgaggtgggcagatcacttgaggtcaggagttcaagaccagcctggccaacatgatgaaacctcgtctttaccaaaaatatggtagctgggtgtggtagcacatgcctgtaatccgtccctgtaatcggaaggctgagaggcgggagaatcgcttgaacctgggaggccaaggttgaagtgagctgagatcgtgccattgcactccagcctgggcgacaagagcaagactgtgtctcaaaataaatgaataaataaacaaacaaataaataaataaataaaaatgaataagacactttgccctctcattgttttttgttgttttggaaaatgtggttatttttttcattaaaaaatagatcacttttgttaattagtttttttgtcattttaaaatgaattttaaacatttcttggttataatttttaatgtggtaaatactgatagcgataaactacatagataaaagctttctagggtcctccataatttttaagagtataaaggggccaagtgtggtggctaacacctgtaatcccaacactttgggaggccaatgcaggaagatccaacatagcaagaccctatctctacaaaaaaatttaaaaattagccagacgtgatggtgtgtgcctgtagtcctagttacttgggaggctgaggtgagaggatcacttgagcccagagtttgagattgtggggagctgtggtcatgcactacattcctgcctgggctacagagtgagaccctatctcaaaaaaaaaaattatatttttatacacacacacacacacacacacacacacacacacacacacacatatcttatatatatataagagatcctgaaaccaaaatcagagtccctgtaatggggagctgatttaaattgggggcttctggagaagtaaaagatatcttatgtctctgttaaacacttatgttcttctagaaattaggagtgtggttttctccgtatttccaaaaactgcaagtctttttatataacgagtgtgttggttgaatctaattttaaaaaaaatttttttaatttaaaaattttttaatttttaaaaatatggagtgcttcatgaatttgcatgccattcttaggcaagggccatgcctatcttctctgtattattccaattttagtatatgtgctgctgaagcaagcaccaaattttgttatcaaagtctactgtagatggccgttctttctttgatttgtggtttggttgaaacctttgttggaaataccatcttatttcttattactgtaggaaatagatctggattcaaattcctcttggtatgaagctgggaagattacttaacctgctaaaccttaccattatttatctgtaacatggaatacatattatcttactgtggtgtaatgatttaatgaactaatgtatgtgacctgattcataagtgaccagaacagagacaatccataaaatggtaattctttttattttatatacacagcacatacatactggggttagtttcagttagtgagcagagaggtctgtggataaatcaggatataacaatcatcattcaaggatatattcaccattcaaacagtttatcagaaggcagaaagccagaatgatctattgtgtatggttattcatctttagaaaaaggaacagaaagtgtgggcttagaatattttaaataagtagctctatgttacaatgtagatgatttagggatggggtagagttttatgtgtctggcactacagcagtgcctcacatttactaaatgtttgaataatattaattaactagagattcttgaaaacacatttttagaagccttgaaaaagttatatacgacagattaaaggccaagcctgagaaagcttacatggctaactggaaaaataaataaaggtaccatagaggaaaaacaaaattgccctgtggggagaacatgtggtgtcatatggtgtgactaaataggatccagtaagataagacaaggtagagcatcttgggagtgattccatgtttcaaggttaaaatgttaactacattaaaggtagtaaaccagtgaaagaatcctcaagatcccagtgcagaatgtttgccaagagataagaagatcaactgttttggtattcatagcagaaagccataggaaaattatctttttgatattcttttttgaagaagataggtcctttatttatttatttatttatttatttatttatttactttattttattttattttttgagatggagtttcgctcttgttccccagctggagtgcagtggtgcaatcttggctcactgcagcctccgcctcccaggttcaagcaattcttctgcctcagcctcctgagtagctgggattgcaggcatgcaccaccatgcccagttaatttttatttttagtagagacggggtttcttctccatgttggtcaggttggtctccaactcctgacctcaggtgatccacccgcctcggcctcccaaagtgctggcattacaagcgtgagtcaccgcgcccagccaaagataggtccttttttaagacagatacttagggctgggtgctgtggctcatgcctgtaatcccagcactttgggaggccgaggcaggtagatcacctaaggtctggtgttcaagaccagcctgaccaatatggtgaaacccaatctctactaaaaatacaaaaattagctgggtgtggtggcgtgcgcctgtagtcccagctacttgggtggcaattcaaggagaattgcttgaacccccgggaggcagaggttgcagtgagccgagatcgtgcctctgccctccaacctgggtgacagagcaagactccatctcacaaaaaaaaaaaaaaaaaaaagatactttgataaagaaataatagttatttctcattttatttctcatttgagatgaactcaaagttggctaaagtgacacacagttttggacctataacttgcttacattttaaatattaggttggtgcaaaagtaattgtggtttttgccacccaatagaaaggattgtagacatttttttatttgacaactgtaaagcattgcaggaattatatgtggaattataggcttactttgttttattgtgtttcattttattgtactacacagataatgtggttttttttacaaattgaaggttggtggcagccttacatcaagcaagtctgttagcgccatttttccaacagcacatgctcactttgtgtctctgtgtcacattttagtaattcttgcaatatttcaaactttgtctgttttggtgttctgtgatcttgcatgttactattgtaattgttttggggtgccacaaaccacacccataataaggcagtgaacttaatcagtaaatattgtgtgtgatctaactgctccactgactggctgttcccccaactcttctccagcctccgcatgccctgagacacaacaatattgaagttaggccaattaataactctacaatggcctctaagtattcaagtgaaaccaagagtcacatgtctcttgaaatcaaaagctagaaatgattaagcttagtgaagaaggcatgtcaaaaagctatgccttttgtgccagacagctaggttgtgaatgtaaaggcaaaattttggaaggaaactacaagtgctactccagtgaatacacgaatgataagaaagcaaaacaggctcatgcctgtaatcccagcacttttaagaggccaaggtgggaggatcacttgaggctaggagttcgagaccagcctggccatcatagtgagacgtcgtctccattcatttttaaaaagcaggcaagcaaaacagcctaattgctgagatggagaaagttttagtgatctggatagaatatcaaaccagccacaacatttccttaagtcaatgacaggctttaaagcttcaaaggacaggctgactcttactagaggctaatgcagctggtgactttaagttgaagtcagtgctcatttatcattccaaaaatcctagggccctttggaattctgcaaaatttactctgtctgtgctctgtaaatggaacaatgaagcctggatgacagcacattcttttacagcatggtttactgaatattttaagcccactgttgagaccccctgctcagaagaaaaaaagatcccttccaacatattactaatcgttgataatatacctgatcacccaagagctctgatgatgtacaaggaagattaatgttctcttctgttttctatgtgtgtgtgctttttttgttttgagacagggtctcattcttgcccaggctggtgtgatcatagctctctgcagccttgaacccctgagctcaagcaatcctcctgcctcagctgcctgagtaggtgggactacaggcatgcaccaccatgcccagctaattttttttttttttttaatagagacagggtctatgtttcccaggctagtctcacaaactcctggtctcaagtgatcctcttgcctcagtaatgtttttcttaaccactaacgcagcattcattctgcagcccatggatcaaggagtaattttgactttcaattcttcttatttaagaagtatcttttattaggctatagctgccatagatattcctatgatggatctgggcaacattaattgaaaaccttctgcaaattattcacctttctagatgccattaagaatgtttgtgattcatgagaggaggtcaaaatagcaccattaacaggagtttggaagaagttcattctaatgcttgtggatgactttgaggggtcaaaacttcaatggaggaaggaattgcgggtgtggtagaaatagcaaaataactagaattagaagtggatcctgaagatgtgaccgaattgctacaatgtcatggtaaaacttgaagaaatgagaagttgcttcttatagatgagcaaagaaagtgattttttgagatggggtttactcctgctgaagatgctgtgaacactgataaaatgacagcaaaagatttagaattttacataaaattagttgatgaagcactggcagatttgagaggactgactccaagtttgaaagtagttctactgtggttcagatgctatcagaccatattgcctggttcagagaaatcttttgtgaaaaaaagtcagtcggcacagcagacttcattgttgtcttgttttaagaaattgccggccgggcacggtagcttacacctgtaatctcagcactttgggagaccaaggcaggcagatcacctgaggtcaggagatcaagaccagcctggacaacatggtgaaaccccatctctactaaaaatacaaaacttagcaagtcgtggtggcacgcacctgtaatcccagctacttgggaggctgaggcaggagaattgcttgaacccaggaggcagaggttgcagtgagccaaaatcacgccactgtactcccaccctgggcgacagagcaagactccatcttaaaaaaaaaaaaaagaaagaaattgccacagtcaccctaacctttagcaaccactgacttgatccggcagcagccatcaacactgaggcaagacccaccaacacaaaaatgatgactccttgaaggcccaggtaattgttagtggtttttaacactattttaaaattaagatatgtgctttttttttttttttttttagaataatgctattggacattactagactacattatagctacacttttttgttgttaatttaaaaattgtgggccgggctcagtggctcacgtctgtaatcccagcactttgggaggctgaggcaggcagatcacaaggtcaagagatcgaaaccatcctggccaacatggtgaaaccccatctctactaagaatacaaaaattagctgggcgtggtggtgcacgcctgtagtctcagctactcgggaggctgaggcaggagactcttttgaacccgggaggcagaggttgcagtgagcagagatcccgccattgtactccagcctggcaacagagcaaaaccctatctcaaaaataaaataaaataaattatggccaggcgtggtggctcatgcttgtaatcctggctctttgggaggccaaggcaggtggatcacttgaagtcaggagttcgagactagcctgaccaacatggtgaaaccacgtctctactaaaaatacaaaaaaaattagctgggcatggtggtgcatgcctgtaatcccaactgcttgggaggctaaggcaggagaatcgcttaaacctgggaggtggaggttgcagtgagctgagatttgcgccactgcactccagcctgggtgacagagcaagactccgtctcaaaggaaaaaaaaatggatacataatgattatatatatttctggggtacgtgtgatattttgatataggtatacagtgcgcaatgctgaagtcaaggtgattgggatacccatcaccttaaacatttatctttgtgctggaaacattacagttctcttctagctattttgaaatatatgataaattgttaactgtaatttccctactatactgtgaaatactagaacttactgtttctgtccagttgtatgtttgtatccattaaccaacttccctttatccctttctccctccttttcttcccagactctgataaccactactctactgtctacctccatgagatcctttatgtattctggatatagatcctaattaaattcatgacttgcagctattttcttgcattctgtaggtttttttcactttcttgagaatattcattgcacaaaaggttttaattttgttgaagaatgatttgtcagtttttttttgttgctcgtacttttggtgtcatatctaagaatccattgctaaatccaaggtcattaagatttacccctatgttttcttctgagagttttattattttagctcctatatcatttattcattttgagggtttttaaaatatggtgtgaggtaggggtggacatttattgctataaattgtcctttgagcattgcttttgctgtatgccatcagttttggtatgtgtgttttttttgttttcatttgtctaaaagtattttctaatttttcttgtgatttctttttttgaccttgtatctatattcaagagggatattggtgtataattttcttttttgtacagtcttttgtattagtgtaaaggtgatgctggaatcataaagtgagttggaaattacttactccttttctgtttcatggaaggtattttgtagaggtggtcttatgtcttctttaaatacctgatagaatttgctactagagatttatttttagaaaggtttttaactatgagtttaatttccttaatagttacaagagtgttcagattatctgttttatcttgtgaatataaaagatatcttcagatatcttttatcctgtgagagttttgtttttctttggtttttgaggaattggttcatttttttctaacattttgaatttatgtagagtttttcatagtattcttattaacctttaaatgtctgtgtgtaggggagtctgtagttcattgtttttttattactgatattgttaatttgtgtcttccctttttgtcagtcttgctagagatttgtaaattgtattggtcttttcaacaaacaagcttttgttttcaacatttttttctgttttcaatctcatggatttctgctttttattatttttgtgttgctttctttaggtttatttagttcttcaagtttcttaagatagatttgcaactgtttttctttgctgatataatagtatcagtttaagagcagggcttggtggcacatgcctgtaattccagctatttgggaggctgaggtggtagcatcacttgagcctaggagtttgaaactagattgcgcaacatgcaagacccacccccccccccatctcttaaaaaaactaaaaaaaaaataatggcacaagcttaatgatattaattcactgtagcactactgtatttgcatcccacagatttagtatgctgtattttcattcagttgaatattgaactagccttgtggtcctgggattaaccttattgtcatgtttattatgccttttacaattgctggattctgtatgctaatattttactaatgattatgaggaatattagtatgtaatttggggcttccatttgactcaaagattatttagaaatgtgctgtttaatttccaggtgtttggagattttcctattaactttctatttctagtttaattctattatggtcagagaacaaacgtttgtggtttttttttaagcttgtgaaagtttgtcttatgactcagaatatggtctgttttggtgagtgttccatgtgcatttgacaagaacatgtattcagctgttaagtagaatgttatataaatatcaatcagatcaggtggattgatgatgttcatttcttccatattcttactgattttctgtctactagttctattactgaaaggagtgctgaagtcatcaaatataattaagaatttgttttcctatttgtaatgttctgtaagtttttacttcatgttctttgaagctccattattaggtgcatatatattagttatgctttctattatgaaaattatatttgaagtgaattactcgtagactacatatagttgggtcattttaaaaattcattctaacaatcttgtcttttaatttgtatctatagactattcacatttaatgtaattttggcatgtttagatttaggtttaccagtttagtaatttgttttctgttagctgcttctgttttccattactctgtctttcctgcattcttttagattgtttgaacaacttttagccattctgttttaatttacctgttgtggcttaaaaattcttaactctccatatagttttagtgatcactccagagattacattataaaaacttaacattttcaccacctgctttaaaataaattcatttctttaaatggattatggtccacttaaagaaatgttaaaactacgtaggtctctttatcttctctccaccttttctcttattgttggctgtatgttacgtttctattaattgaaagcttcattgggcaatgctattgtttttactttcaaccattaaacatatttaaggaaactaagaggagagggttaatgtatttttgtctgcatgtttaccattttgcttactcctcaacctactcttccaggtttccttccggtattatttcccttctgtgtgaggaatttcttttagcaattcttttagaacaggtctgctggtagcaaattctcttagttcccatttatctgaaaatatctttgttttatgattgctctgaaagatactttaactggatatagaattctacctttgatagtttttttctctttcagcactttaaaatgtgtaacttccttctggccttcatggtttctgctgagaaacctgttgtcatttgaagtggtgttcccctatattttatggattgtttttctctgttttcaagataatttttaggctgggcgcagtggctcccacctgtaatcccagcactttggaaggccgaggcgggtggatcaccggaggtcgggagttcgagaccagcctggccaacatagtgaaaccctgtctgtactaaaagtacaaaaaacttagccaggcgtgttcgcgggcacctataatcccagcttctaggaaggctgaggcaggaaaatcgcttgagcccgggaggcggaggttgcattgagctgagatcacgccattgtactccagcctgggcgacagagcaagatgctatctcaaaaaataatagtaattttttgtgtttcattttcaacactttatgatgtgtgagagtgtggaattctacgtatttatccatttttggattcaccgacctttttgaatctgtagttttatgtcatttgtcagatttgggaaggcttttgacattatttcttcagatatttttaatcatcctattctttgcttttagaagttcactgacacagatgttagatctttttgttactgtcccatagatccctgatgtattactctattcttgaattgctataaagaaatgcctgagactaggtaatttataaagaacagagattcagttggctcatggttctgcggactgtacgggaaacatagcagattctgcttctggggaggcctcaggaaacttaaaatcatggtgaaaggtgtaaaggggaagcaggcatatctctcatggctggagcagaagcaagagatggggagggtgccacatacttttaaatgaccagatctcataaaaactcactatcacaatgacagcactaagggggatggtgttaagccatgggaaaccgcttccatgatccaattttctcccatcaggccccacctccaacattggggattacatttgaacatgagatttgggtggggacatagattcaaaccatatcacctggattctgttcattttattttaatccccacagctacatcaattggagacctggttctctccctgctctcagaatgttggctcttttgaagatcctattgttgccgctgccaccatggggttacgtgagaaaagtgaggggaaaaaactgagacactatctttgaatgttatttctttgcctttttttttttttttttttactttttttcttttaaaaagtaaactttttttaggccagtcgcggtggctcacgcctgtaatcccagcactttgggaggccaaggcgggcagatcacaaggtcaggagatcgaggccatcctggccaacgtgatgaaaccccgtctctactgaaaatacaaaaattagctggacatggtggcgcgtgcctgtaatcccagctacccgggaggctgaggcaggagaattgcttgaatcagggagttggaggttgcagtgagttgaggtcgcgccactgcactccagtctggcgacagtgagactccatttcaaaaaaaaaaaaaaaaaagtatgtaaaatgtaaactcactgatggtttcatgatgattcagatccttgtcctctatcccaatcgtctactgctatttacttccagtgttgtcgattagctgctctatgtgttctgtccaagttttatagttggactaaatctttgaagtgtgttcccaccacccccgtaatgtgtgactactaatatttctgctcaatttgttctttttcccctccttgtttttatttttattcttggcttcctaggggttgctcctgtctttccatagcttaatgtcaagctaaagatttgtcagaggttttgttcaaatatttcaaggccagtaaggtttctattctttctttgtgtgtctatctgtgtatcagggagtatattcaaacttcaggccaccatgttgcctgacctggcttttgctttcctccgggctcctctgtgtctcctgtgtgcatgaacatgcagaggctcagtcagtcaaggatgtgtggaggtgtgggccctgtccagaccctgtagcacgtgcttgcagtgtccgttcaactagtggagtgtggaaagtgtattaagcccccaacttgcagtggaggttatcacttaaattcacagcactccaaatcaattgtcaacaccctcacacacacacagtctctagctgaacacatgccaacagagggagagattggtcagtcatctgaagaagggatggcagcagcctcaagcaaaaatgccacagatggctgggcatggtggctcacgcctcttatttcagcactttgggaggccgaggcagatggatcacctgaggtctggagttcaagaccagcctggccaacatggtgaaaccctgtctgtactaaagatacaaaaatagctaggcatggtggtgcatgcctgtaattccagctacctggaaggctaggacaggagaatcgcttgaatctgggaggcagaggttgcagtgagccgagatcgtgccattgcactccagcctgggcgacgagcagaactctgtctcaaaaaaaaaaaaaaaaaaaaaaagccacagactgtgatgttcttactcaggttcagcctttagctgaagtccagagcactgaaatggttgttttgacggttttgtccagctttatagttgcttttgggggagaggatttatcaatgtactcatttcatcatgccagaagtagtagtattgatatgattttttatatatatcttagaattttgaagatactgttttcttattttctagcatacaacaatctgattcttgttttttattccttagaattttattggtactttcttatttccttttgagtttaacttagcaggatttgtttaattttgtatccctccaagcacccaggctggagtgcagtggtacaatcatggctcaccacagcctccacctcatgggctcaagtgattcttcctctttggcctcctgaatagctggaactacagacacatgccaccatacctggctaatttttatttttttttatttttggtagagatgaggtctcgctatgttgcccaggttggtctcaagctcctgagctcaagcagtcctcccacctcaacctcccaaagtgctgggcttacaggcataagccaccatgcccagctcttattctttctttgttaaaaaaggaactttggttctgaagactcttatttgccttttggctcaaggagaaattcttaaattttctttgttatttcttcttcttattttaattctcataaaatttctcttagatgtatgtaggataatttaatctgtattctgggatattaactttactctcataatttaagctttcattttacttcatattttttttttaactttttgttaaagtaccatggactttagctttgtccattttgctagttaactccttttttaggtttatttcaacagacattttaaatttcaagcttgttctgtgcaatttatttatttatttatttatttattttgagatggagtttcactcttgttgcccaggctggagtgcaatggtgcgatctcggctcactgcagcctccaccttccagattcaaatgattctcctgcttcagcctcccaagtagctgggactgcaggcatgtgacaccacaaccggctaattttgtacttttagtggaaacggggttcaccatgttggtcaggctagtctcgaactcctgacttcaagtgatccacctgccgcggcctcccaaagtgctaggattacaggcatgagccaccgtgtctggcctctgtgcaatttagtatttttgttttctttagtgagtgcagctcctccataatagcactatatacaatataattttctgtgctatgcagtatattagccagtagctgcagtggctgggaatgtggcctgtgagagtgagaaactaaattttatattttatttaatgttagtttatataaaattaaatagccatacatgtctaatgattactagattggacagcacagctctacaatttaagaatccttatactttttggcttcaaaataattctgatgccttagttcatctcctcattcaattgcatgtctgttttttatgctcttggttttttttaggtgtctaaaggttaataaaggttaaaaatattggaagttagagtaggtttcctcaacacttaagtgagtttcttctggagaaagtgaatattgaatataaaaatccattaatttctagttctactaagtgagctaggcagtccttgctttagagaatatgggtacttcttctcaatatgtgtatgtgtgtagcctctgtccctgtggtggccagaatttactataattctgtctctggccatagtgtccagacagaaatccctgtaagctgattacccttttccaccaggtttagatcagatacaaatatatgggggcaaagactgagttactctttttttttttttttttttttttgagacggagtcttgctctgtcccccaggctggagtagtggcgcgatctcggctcactgcaagctccgcctcccggattcacgccattctcccgcgtcaccctcccgagtacctggtactacaggcacgtgtcaccatgcccagccaatttttttttgtatttttttttgtatttttagtagagacagggcttcaccgtgttagccaggatggtctcgatctcctgaccttgtggtctgcccgcctcagcctcccaaagtgctgggattacgggcgtgagccaccgcgcccagccagactgagttactcttgaacatgtgatttgcatctaaaccaaatttgttaaaagtcttttttttttttttttttaagtaagaaaaggcagtgattttgatttgtaatgtcttttgttaggagaagtaaaagaaaaaaaattcttgaagaaaagtgagccagaattactgcctagggagtgatagtcatgtaggttcacaatgaagtttagaagtgctcttcgtggttccgtttcctcttttgctttagtgttcaggaaactaaaaactgacagtagactagttggaagatagactaggttttttttttttttttctagttaacctaagtcagaagggtgatatcactagagacttggaagtaaaaagagctacctgcaaagacttgaagtactaagattacctagaatctgaatgccctgtgttactctgcagatagggcattttactgttatgaagagataagatctattgtaaatagtctaaactaataataacgagtaagtatggaattggcgtttttcctttaaagttttagcatataattttgaaatgttttaagaatatttttgaaatgtttctattttttaatttctcttttagaagtcttatctaaaataagcatgtatatcttacatgtaaggaattattaacttcattttttcataaaaataatcagagtaagactttcaacagatgtcaggatagctgaagttctccatcactgtcatacgtttcacttatgacaggtttgtaatttctgttagggaatgtcatctaagtgctctgcatctggtattttctcctgcaccctcatgacaagaaaaaagcctttgattatttctcttttctctctatttacatgttcaccactgccttccatgttcagatgtgatctacatgcaatgatgattactctttccttcctttcccccttgccctcttttatcgtctttctttcttcctttttttggttgaccctgtttaaatgggatctatcaaatataccaagtttcagtgaaagttacttccttgtgttaaaagtcatgactttctcttttatttatacacttaataacttgattatatatacttgaattttgttttagtgcagaataattttataatctttctgaaggtattttaaagtggcagttaattccaacatttgtaataccaacaatgcagataactgagttgaatgacaacagcatgaatagccttgattaagttgtacatgtgcagatagctactgtgtatatcatgcctgccatctggacaacagtgatttttttttctttttttttttttgtttgagacagagtctcagtctgctgcccagactggagtgcagtggcgtgatttcggctcaccgcaacctctgtctcccaggttcaagtgattctcatgcctcagcctcctgagtagctggaattacgggtgtccgccaccatgcctggctattttttgtatttttagtagagacggggtttcgccatgttggccaggtaggtctcgaattcctgacctcaagtgatctgcctaccttggcctcccaaagtgctgggattgcagacatgagtcactgtgcctggtcagaaaacagtgatttttaagatgtcatcaattgtatggtagaatctgaattcaaagatgttaagaaggggatgggggaaaggtgtctcttagaacatgtaaaagaacatgttatttctgtcaacttccaaacttttatctccagccacatctcttacttgatttcagatttgtatacccagctcctgttttacatctccactctggttaatgtgcctcccgggatattttaaatataatttttaattctgcatcctatgccttgtcctcccaacctcagtgttccttcttcattctttttgatttttggctcttacatcctttgacttaggttataaactgtagagtcgaggatgactcccttttatcatacctcacatccaatttaccagcaaatcctattgactgtacctttataatatatttagcatctgacacatcttatcatctcttccactatcagtctgataaaagccaccatcatctttcacttggccatcatttcccatctggtttcttggcatttacactatagttcatttccagtatagcagccagagtaatactttaaaaatataattgatcatattgtttcctttttttcaaaagtaacttcattgagttcacctaccatacaaatcactcatttaaagtgtacagtgcggaggttttagtgtattcagtgtgcacaacaaccatcaccaaatttaattttagaatgttttcattagccctaaaagaaaccccacacccttagccattctcccccaatccttatattccccccatttctaggcaatctaatttctgtctctgtggatttttctattctggaccattttatatacgtggaatcatacactgtgtggttttttgtgactgcttcttttacttagtgtaatgtttccaaggtttggtcatgttatagaatgtatcagcattttgtttctttttattaccaagtaaaattccactgaatggatatgcgacattttatttattcatcagctgatgaatgtttggactgttttaactttttggctattgtgaataatgctgttatgaatattcacaagtttttgtgtctcctcctgctgtggactactgtttccctaacagaacgtattaattttcttttgtacaaaagccactccaaagcatagtgcttaaaacaaccactgcttgggtcaatgagcacactatattctgcactgcactaactttggctgtgctcattcatgtctgtgaccagtggtggttttaggtagatggctagtctaggatggtcttgagtggacaacttggttctagtaaactagtccaggcatgttctcatagaaaggcacaggtgagagagtgagcaagttcaattgtacaagaggacaagacttgcatatttgcattttaagcttctctttgggtcatgtttgctaatactacattacaaggtatcacaagagcaaggagaagcccagggtcagaatggaaaggggattgcagagttacgggtaaaagatgtgcctacagagaagccattaattgggggtcattaatgctatgtctgttgcacataccaattttgcttctaccttaatgctttttgcatttgtttcccttctgtttgaactagttttctcttacatacctgcatgctgaacttgtttcacttccttcctatctctgttcatgtatcatcttaccaatgagaccttcaagttttaccatactacaaaatgaatagccacccaccccgatcctgctcacagtctctgtttttctctataactttttatgaccatctgacattgtctgtttttttttttagcgtttatcttcccttaactagaatgtatgctctatgaggtcagggactttagtttaattacactgtcttcattgcctagaaccctggcactcattaaatatttgttgaatgaaaaattaatctacattgatccatttttacctaaattggaattatcttaaagttctaacctgccttcatgctatggcatgtataaagtgtcagtcttttgattagaatacctaatgatggaatatttcttctacttcttatagagacatagaccatgcaatatatgagtaattctaccatttacttagctgtctgacttgggccaagttttttttaacctccctgtttcctcatctgtaaaataggggtaataatagtcccagcctcatggagcctggcacaaggtaggcactgtataaggttggtgcaatgtgtattgcataatattttttatcacctacttgttattggagtatatggcacagggaaaatggaattgaaagctggagcaatcttatattatggagaagttgcaaaatctttgaaaactattttttcaaagggacaaagcacataaagcaaatgaaataggtgatttttttttcattgaatgcatcataacattatatccttaaaacactgtcttacaaagtgctctctgaaaaatactgttctttatttcagggtttacgaaaaagtacataaaactagtgagcatacatcttaactctctgagagtcttataagtaccatcctagatgcatggagagaagataattcattacttacactaggtcatgccttaggtcgttaagacttaagtatctcatggaaccccagttgagaaagaacaaaaatataacatcttgactaaggtggctagtgcttctctgatcttaactattatttctctagcctcaggtgagccttcttgaatgtgatttcatcagtctcctctaagcttacccagaatatagaatttttaatattttatatagccagcacttataaactacctgcttcatgctaggtagtatacttaggtgctaggagtaaaactgatcaagtggggtaagttccaaattcacagagcgcacagtcctaacaggctgtcatgcctcagttgtttatttgtgacagtgtttcccacagacttttaattttggaatgataggatgtggtgctctggaatggtgtcccagggttttggagaactgagagtaacctgggaaagcaggttacagtgagagaaagttatgaccaggagttgtaccaaaacgcaggaaacatgatatgtatattgttatggtgcataaaaatacttacaattaaaagtcctgaacctacactacatctattgtttcacatattttccttcaatttaaatcctgctccaaatacagctcctttccgaaaattcagttttatgtgacagaaatttgatctgtttcactgaaaacccatttgaatagtaattgtgagcaattgttgaatttgtaaatgttacgtaaatttagtggatgactttgtggacagtttgacgttatggacagttattcttgatactgtttcccctcctttcccctgccatccctgaaactttagggcttaatctgcttttaattagccagaaaaaaatgtttgatcctcttattcagttttagattattttagatgatttctaagttaaactctaagttagaatagtttctgcttattgatttcatgaatatcacttctctatttctacttctcaccttctgccaggccaaaggaattgtggaactatgatcatcaaactcctaaatcatcagccttttccttaaaagacttaaaagggttctatctatgtagacacttgtctggctcctgattacagttttaccattctcaagtgatactatttgtttcatcacagtccacataattcagggtcaagatactattatgaaatgactgtaaaaattactaatacctttggctctctaatttttctctcttttcatcatatgggcctgacaaaatgcccgctacctgcctgcacttaggcaattgaatgtagtgctttaaatgtataccaaaaccctcaacagggcatcaacaatgtctggcagtgcagctgcttcttcactttcccaattaaaaatgcgtttgctggctgggcgcagtggctcatgtgtgtaatcccagcactttgggaggccgaggcaggtggatcacttgaggccaggagttcaagaccaggctggccaacatggtgaaaccccgtttctactaaaaatacaaaaattagctgggtgtggtggcgtgtgcctgtaatctcagctacttgggaggctgaggcaggagaatcgtttgagcccaggacgcggagtctgcggtgaaccaacatcgcactactgctctctggcctgggcaacagaatgagactctgtctcagaaaaaaaaaaaaaaattcatttcctccactcattgcaaacctctcacagctcccactcctatctgtggaattcacttcaaactttactgagaaattaaatgcagctcttgtcatcttttcaccaccaattctacaaacttgtctgcattggtcctcttgttctgtcttcctttcatttgttatcgaagaccattcccgacagtctgatttctctacttgtgactcagatttcatctttcctgcatctctgtcttccatatcattcttctcccctcgattaaattccctttagccacaaacatgctctattatctcccagccccaatacatctgcaaatgtatgtaaataggaatgaccaaatatgtacagatatacaattcctacctttcctaatgtcttctagccactattatgtgttcctattcttatctaataaattttcttaactgaatattttttccttctacctcagtgtctgtttctttcttttcagccatttttggtttctcttgtaaatgtttatgatccccagggctgagccttcttggcctatactctcttgtaggtctgcctcccagtatgctagtgacacccaaatatgtcttcagcctcatctctcctccagggttctaaacttgcataaccagctgccttcttgatcatttagtaagcctctcctgttggtgacataatgcttgatttctctccctcatggcatcactgtccacccgttgcacacatcagaatttcagaatcagccttaattcttagttttttctcactcttcctccatgtctaatccagtagccctatctccactgttttcaccttggtccaagcaatcatctcttgcttaacacaaccatagtttcaactagtcttcctccctgcattcactcttggcccaagcaatcatctcttgcttaactatggttgcttaacacaatcatagtttcaactagtcttcctccctgcattcattcttggcgcaccgtaatccattcttcactagagtgataattagaggtactataatatatactgctctagagttatattgtctagaatttactagctgagtggccttgagcaatatacttaacacttatgccacaatgtgctcgtctataaaatgggatggtatatttatctgttctctgattgctataaaggaatacctgagactgggtagtttataaagaaaagaggtttaattggctcacggttctgcaggctctacagaaagcatgatactggcatctgctcaccttctggggaggcctcaggaaacttacagtcatggcagaaggcaaagcaggagcaggtgcgtcttacatggcaggagcaaggggtagggggaggtgctacacacttgtaaacaatcagatcttttgagaactcactcatcaaaaggacagcatcaagaggatggtgctaaaccattcatgaaagatccacccccatgatctagtcacctccaaccaggccccacctccaacattggggattacaatttgacatgagattgggtggggacacagattcaaaccatatcagaagtaaattgttagtaaaatataaatcagattatgtcacacatacctgtttttgaaactttagattctcattgctcttagaataaaattaaaactctacttaccgtggctttcaggatccttcataacctggcatattgcctaatttttctgatacccatcttgtttctactctccccttgcttaccatatagccacagtcactatctttaactttctagttggaaacatggctttttgtggggtgtatttccttttactttctattgttttgggaccaacttatttacgtcagttttgtgtttgttttgttatatgtaaaaatagtgccttaaaaaatcagtttttttttttaacctggtgaatcatttgttttatctttataaatgctgggacgagaggcctactccttttttccaattttgtgagagattggtaaaattcttagaagtggaattgctaggtcaaaagatagaaatgttttcagatggatgattcctattgaagtaaattttttgagaacttaacatgtccaaaaaggttttcatttgccctcatgcttgactggtagtttgcctggatgtaaaattccagattcacagtcatttttgcccagacagtgaaaacattattctactatcttttaaaaaataacagttttattgaggcataattcatataccatactatgtgcaatttagtggtttttaatatattcatagagttgtatagccatcaccgcagtacattgtagaatatttttatcactcaaaaatgaaacccctggatttattagcagtcattctctgttcccaccaatttgcccaccccccagccttaagtcaacaagtaatctactttccgtcttcattgtcttttaatgttgctgatgaaaagtctgatgccaaattaattctagttataggaagcttttagagttttccgttttgaatttctggaatttaattatgtaaactaggatttatgtagatatgagtcttttaattcatccgccttagcctcactgagcccttttactcagaccattggtgtttttaactccaaatatttttagcataatctttatttattctattttcttcatttagaactcttactaaatgtattttgaacttcccaaacatattctttatatctcttcaactttttacttgtatcacccatttctttctttcttgctctctcttttttaacctctctaccttctgggacatttctttgtgttacatatcactactatgatctttatcaatactacttctgttatttaccccttctcctcaagtgttttcttagtaataatatttcagttttctccttgcccatttattctgtttgttcattgtgatctttttctttcctcccattggatattcatagtgtcttgtgattcttgtttattgaataaggactaaattgacaaaaactttgcagttacataggtctaggattcttttctaaatgggaaatgactacaagtgtcatgtattcattgactggctttcctccagggtgcagggattttaagaggcaggcttaaggccaccccagttaccaaagtaaggacagctttactatgtttattcctggaaggagctagcttacttacttagtatcctcctccttcagtatcttccctctttccctctcgccctcccacttttcctttctacttcaagtatatagtaaagtgtagggaataatataataactatgtacctattactcagttttgttgaattgtcttatatatgcttcagatttttataaacaaaaaaattatagacacagatatagcaccttacagtcttactttgatacttttctctgccctttctgccttttcagaagtaaccattatcctgaatttactgtttatcatgcccatgcacatttcagatacttttgctgtgggtgtagatccacaaacaatctagaacgttgattgcatgtttttgtgaaccctgaaagaaccaaccctttaaggcagattctgagtggctaacagtccaaattcaaaatagacccacgcgatcctttgcagacatgtagagatcatatgtgtactccgcattcctggaaaacctatacacccagtaactttaggactttcatagctgtctgttcctatttatgccacctgaattaacagctaccagaaaataccatttggccttttgtacctaacaaacactctgtgacctgcctcagccaatcagaactgaacaagtttgcacccctcatttgtatagtggaccagagtgggaacctgactgtgaactttctctgtaaatgacaaccccttttctttgttctctcagaaggcgcctttattttctaccaaggtacatctccacggtttgcaaactgtttgctggaataaagcctgtttcttttttaagaaagaaaatctttttctgtagattgttgacattttaaaagttgtatatatcctgaaacttgctttttcatcaatattatgtttttgagatgtattcatgttgataaatatagcgctagctttttgttttgacttaatatgtggtattttgttatacagatgtaccagtttgccattttttctctcttagggaacatttgagttggttctagttttttgctattataaacattgctgcagtgaaaatgtcttgtacatatgtgaatataagtagctacatgataggatatgctcatccttagctttactctagatattgccagtttactttcaaatatttatattataccacatgtagaatatgatagtgtttgttgctacatgtacatgattaccaactcttgtattattaggcccaatttttttgcagtctcactgatttttcatatgtatgtatgtattttttgagacaaggtcttgctctgttgcccaggtgggagtgcaataatgcattcctgtcttattgtagcctcaaacttctgggctcaggcaatcctcccacctcagcctctcagcctctgttagctgggagtacaagtatgtggtaccgcatccaactaattttcttttttttcttttttttttttttttctagagatggggtcttgctatgttgcacaggtgctgggattacagggatgagccattgtaccaggcctggtttttcattgcatttctttgattactaatgaggtcatttattttatgtgtttattagatattcgaattccctatagtgaactacctattcataagtcttttgcccattttcttttggattagttgaccttttccaaaaggatggccacttaccctggaaatatttattatatagtccgttctgttccccactaaattataatgccaatgtgaaccatatgctgtgtaaataaatacctgtgcctctgtttctgagccctctattctgtctctttgggctttctgtctctatgctagtatcatttctctgtaagtcttgttttcctggtaacaccagtcttaccctccttattattcaaaatagccaaaggctactattatacagtgcttccataaaaattttagaatcaggctgggcgcagtggcttacgcctgtaatcccagcactttgggaggctgaagcggacggatcacgaggtcaagagatcaagaccatcctggccaatatggtgaaatcctgtctctactaaaaatacagaaaattagctgggcatggtggtgtgcacctgtagtcccagctacttgggaggctgaggcaggagaatcacttgaacccaggaggcggaggttgcagtgagccgagatcatgctactgcactcgagcctggtgacaaagtgagactccatctcaaaaaaaaaaaaaaaaaaaaatttacaatcagtttttcaagttccatgggggaaaaattatttttggaattttgtttattgcactacactgaatttatttgtggaaaattgacatcattataatattgaatcttcccataaaaggatatttatgtaggtctttgtcaagtgaaggggaacacatctgcatgcacacatacatgtcatttggtgtaatgtgaaataaggtttagtggagaaaaataaagaagtattaaggcacacacaattccctaaggtctgttatccccatatagatgtgtgcactggccagacacatctagaactatgtactgtggaaagggctcctgtgtaataattggagctttgaggttggtgaaatggtcttactagggaaagccatcagtactctgtggctgatcagccttttcttgcatgaaacaaactcagacctcctgagccaactttttgataagctaccaaaacaggggtggaaacctctagagtcatctgactctgtctctcttcttagtagccttttgtgcacctgcacattattttgttgtttccgtcacaaaagttttgggaatcttttgttagacttttcttctagattctttataatgttactatcatgagaagcatctttttttaattggctctggctaatgtgttagaacaccatgtaattttatgtccttgattttatatccaacaaaccttgctaaactcttctgttagtttttatagttaataggtattagccctgatggtttgtagattctcttgggtttttctgtagatagcatgtttcctacaaataagttttttgtctctataattctaattcttatgcctctttatataaatatatatttatataaacacttatataaacactacctatactaccaagattcaatgattgttaacattttactgtgtgtatatctcctaagaaaaaggaaattatttcatttaaccaaaatatcatatgtaggaaggttaaaattctatcatcttacatctgatatgtgttcagatttccatggttgtcccaagaatgtctcttgcagctatcttccatccctaaactaagatccactctgcatgcactgaattatttgttgacttttagtagtagttatcttttagtcttaaactgaccacctactgttttgttctcccatgaaatgatttattaaagaatccaggacagttgtcttagaatgtcccacattttggattagtccaattgccaaggctttgactttcaaagagaagaaaaatgtcttagagaatgttccacaatctatatttgattatttcagtgtagcagtcttagcgtatttctctattccctgtgtttcttctaaaccagaagttaagtatgaaggcttgattagattcagtttaaatgttttgcatgtatacttcatgggtgatgtctcatgttgtatcacatcaagaggcatatgttgggttgttccactattaatgattctaagccacttgaaggtatgttttccccttcatctttaatctgtggcgaaatactttggcactatgtaagtatcctgttctccatcagcttttctcctaatgatttttagcatcatttgatcctttcctgaaccaattattttatattagctggcattcttttgtaaagaagcatttccccatatcaagtgggaataactaatttttcctaaaaaggcgggatacatgcataatttttttcatttaaagttcagttttctaagggtgtaataatcccctacagtgtgagcaactgctctcccacccttttaatttttatggaattttgaaggttttttgtttatttgtttgtttttgcataccatctgttatagtcaattacagtacttattctttttgctgaaaatctccaaatttggtcagtaggagtcccttcaagctggcctctgatgttgttctgatatctggcacaagatgttcctagatctctcttcttgaataataatagataggtttgaaatgctgtaatgctggccctttcccccattaatgtagtcattgtgttgttgttactttgtgtaatctaataatgcttattttgttaagacctaatatgcttattaataaactcattagtaaaacctaaatgcttatttaggtttactttcatgtatattagtctctagattctccatctgtgttcattttctatggctgcaataataaataacaacaaacttggtcacttacaacaccacaaatgtggtgtactctcttacatttctggaggtcggaaatccagaatgagtttgttttactgggcaaaaatcaaggtatcagcaagactttgctctctctagagacaataaggaaaaatctgatttcttgccttttccagctcctagagctgcactgcttgtatttcttggctcatggccacctcctccatcttcaaggtcagcagtgtagcatcttcagatctttctctgctgagtttttatatcacctaatcatctatagtaaaattcccttttatttccctcttataagtatgcttgtcgattacatttagggcttacccagatatccagaataatctccctgtttcacaatacttaatcacatctgcaaagttccttttgccacataggataacatttacaggttcttctgggtcttggtatatgtttagttatcttggtggggggccactattcagccctctcatgccactctttctttgatattacttcttgattcagtttcctttttctaggttgtcagttattttcttcttgcaccttaacgtcagttcattatcttcttgcttcttttactgatgttgagaagtatgccatcagtctgacttgtctttactttctggttgactttaagaactgaacttttttattttcacctgttttggaaaatttatggccagcttctgttcaaatatctccccattccctgtttacctcccagattaactcattttgtgcttcgtgtctttcatattttccattcatttatctctgccttttggctaattttctcagaatcaccttctagtcctttaattctctcttcagcagtaatctgttttacgttacctgaggttttaatttgatgactgtatgattcaaaactcatgtctttatagtttcctcatgcttcttctttatatgtgttgtctttaggcttgctgttcttccagagttatctcagtagaaatttacttttgtgttttggtctgcaatttattagctttgatttctttgtcaaactgattatattcgttttctgtttttcaggaatgttctgaatttttccaactaagtggttgatggtcctggcctccttgctttcagtactgtgattctttcaaccattttcttgaaattttaagaccacttctgtctctcccttccctccctctgttcctcccccaaccccacctttcgtaacaattatttgtttcttggaatctcttaggctagtcctgtagttttcccctttgacctattaagtattatgttactggattcctaattaatgattattcttgcttttaatatatatatttatatatactattatatatgtttatatatcatatatattaatttaagagtttgatgcctttcttcacagtttggattattttatgttttgtttgtttgtttgtttagagatagtcttgctctgttgcccaagctggagtatagtggcgtgatctcagctcactgcaccctccatctcccaagttcaagagattctcctgcctcagcctcccaagtagctgggactacaggcacgcacccacacctagctaatttttgtacttttagtagagaaagggttttgccttgttggccaggctggtctcaaactcctggcctcaggttatccacctgcctcagcctcccaaagtgctgggattacaggaatgagccattgtacgtggcctatttttttttatgttatctttgttgagttttgacatctaggttttgctagcttcttaaagtaatttagaagatatataagtatatatatgaatatatatataaaatcacctgttactaattgatattttaattacattttctttaagggatgaggggagccaatggctgtagttttttttttgtgccatagctccccttcatgtccttccatagcagtttgtctgcatttatattttaacatgggcatcttctaggattttttaaaaaaaattctcagtcttttttttggagaaggagttttgccatttgtaaagtcactaaaaatgatcagttatttactaagcttgcttggctgtaatagctgtggtctactgaagagattaaaacaggagaggagatcttttagtaactttcttgaagtttttagttttgtttttaattttttcatctcccttttaggattgtggtaacaggtttttcttttttttccaagaagatgttttaactatgtacctaccgttagcttttcagtatcttattctactttttaatatatctctattttataagagtcatcaaagttctttctctgactcttctggagattctgaaagactttctctcccaaacacattctttaaaattccaacaagggtcattgtgacttttttttattcttcggatataaaattactcttctttggggagataaaaaacctgacttccagacacttatggtctggccccactatacctagccaatattatcattttcttttactttttttttgagacgaagtcttgctcttgtcacccaggctggagtgcagtggcgcagtctcggctcactgcaacctccgcctcctgggttccagtgattctcctgcctcagcctcctgggtagctgggattacaggcacacgccaccacgcccggctaatttttgtatttttagtagagacggggtttcaccgtgttggccagctggtctcgaactcctgacctcaagtgatccacccgcctcatcctcccaaagtgctgggattacaggtgtgagccaccactcccagcccaatcttaaccgttttttataccccagcaagaaaattttattctaatcagctcattctcttcatttctcatctctgattattttcccccactttctctctcccatcctttgagagaaatagttctttatgctaactgcatatgagtttttatggaacattgaaaaaaaaaagggagtgtgggtaatattgtcctgaatttactggacctaagaaagaatcactgaactaggatgacctgttttctttcctaccctattctgaaaccagcttaaatcttcagctttaattgcatacctattatgactaagacaccaaaataaatcatgaggggacaaaaaaagaaaatgtttctgatcttaaagtagctaatagacatggaaaacataatcaactttatgttatcaaattatgacttagaaaacagttttgccgagttgatcagtgaacacatcatagagggatgctctaaggaaagatccatcctggacaatgtggcaaaaccccatctctactaaaaatacaaaaattagccaggtgtgctgctgcgtgcctgtagtcccaactacttgggagtctggggtgggaggattgatgccagggaggctgaagctgcagtaaaccaagattgtgccactgcactccagcctgggagacggagaccctgttttaaaaataaataaagtattcatttttttttaaacaaatatatgtttgcttattgtatgctaggcactgttctaggctctggggataaatcagaaaaaataagacaaaaacctatgccctcctggacttcattctgttggggagtgggaagacacacaccaataacaaaatgaacacgtaaaatatatatagtaaggtggtcacatatgctacggaacaaataaaattaacaaagggcatagaagctgattctgtgcctttaaggaatgggagggatagagcctttctaaatgagaaggtaagagaatgcttcattgataaggtgacattgggataaagagatgaatgaacttggtaagacagcaaactttatagaaatcttaggggaagagcattccaggcagaaggaatagtaaattcacaagtcctgcactgggagtatacttggcacgttcagttaggccaaatgtgattggaatgggatgagtgacgggagaacaataagaaatgaagctagacaaatagcagagggccaggtcatggctttggtgatttttagtggggaagccagtggagggttttgagcaagagaatgacatgtgatctgcagttatagttttgtttttgagatggggttcactctgttgcctaggttggggtggcgcgatcacagctcattgcagcctcaacttcccaggctcaagcaatcctcccacctcagcctctgggaccacaggcacacaccaccacgtctggctattttttttttttcttttttttttgtagatacagggtcctactatgttgcgatcctcccgtctcagcctcccaaagtgctgagattacaggcgtgagccaccatgcatggcctgcagttacagtttttgaagaatagctactgtgccattctaggcatgaaataggagaggccatttcagaaactcttgttaataaactaacagagaaatgaaggtggcttagaccagggtggtaaagttagagaaggtgactaatatctacatatattttgatttggagatggattgaaatggattgtcagatgtgagaaaagagtcaaggatgatgctgaagtttttggtttactcaaagaagggagcttatttcctgaggtaaagagactaggaaaaacaagttttgtgggggtgatgggggagatcagaagttagtctttgaacatgttaagtttgaaatgcctattaggtatactagtagacatattcagcaggcagttaggaatctggtgttgagaggaaaaggtagagttggattttaaattttgggcttcatcagttcatagttggcatataaagatacaagattggatgagatcacctagggagtaagtgtagcttgacaaaagaagccatctgacactttttggagatatgaaaaattagcaaaggcatcatgaaagaaaacattgaaatacctgactggaaaaacaatttggaacctctatcactgcttctcagactttaatatgcatatgaatcattttgttaaagttcagtagatctgagatggagcttgagcttctgctgtgtgttttgtttgtttgtttggtttttggtttttttttttttttggcaggttgtggggcggcggtagaaactgagtctcactatgttgcccaggccggagtgtagtggtgcactcatggctcaccgcagcctcaacctcctgggctcaggtaatcctcccacatcagccttctgagtacctgggactacaggcatgcaccaccatgcccggctaatttttgtattttttatggagatggggttttgctatgttgcccaggctggttgtgaactcctgggctcaagcaatccacctgcctcggcctcccagagtgttgggattacagatgtgagccactatgctaggccagcttctgctgttctcacagtctttcagaagatgctgctgcttctggtctgtggacccacactttgagtagcaagactttatatgacaagagtcatgaaaaacaattgaaagaccttaacatttgtagaagaataaagattaatatccagaataaagactatctataaatgaatatggaaaaaacaaacaactcaatagaataaaagggagtgcagtatagggaattttccaaaatctcaaatggccagtaagcataaaaagtgctcaactttgtaagaaatacaaattaaaacatgattgccttttccctttcagactggcaaaagtttagaagtgtgattgtgctgggtgttggtgagattgtggggaagagtggacttataccctgcagatagggacttgacttgatacatttcttcttttggaagaccatttggcatatttattaaattttaaaataggtatatccttcaatcctggaatcctatacctagataccaaaaaataaaacttgcacttttactctgaaaagcagttcagaactatttgttggagtattgtttgatgttgaggaaatggaataatctaaatgtcctttagtaaggaaattattaaatcaagagatttggaactcttttttttcatttatttcccagtacatttaaaaattgatatctgacattttttcattataactttgaatagtttaaaaggccataatttctactgtgtgttatatttatgttaaatacattttttggacaagccttaaagctgcagatttagatcattcaacttagaaacagaatcttccgtataacctaatagccagttctcactatcaaaccagacaaattggactgtttttcttttttattaagaaaaaaaacctgattacttatttatcttaaaacagatatactaatatatgccttttaataaccactaaacttctggattctagtctggctggctggtgatgggtaaggcttggagccttgccacaaatttgtttcattgataaaatatggtcctgctcttaatttttcccccttttctctcaaggaatttccctatttaattgtctatttgttaggtactttggaatttatacgtctcagaatggtgcatcttagtagtatttgaggtggaaaagaactttgcctttcttttataaagtggaaaataattattttaaaagaggaagtagacaaggagaaccagttcttaagcagatcaatcagggagcatacagataaaacttgaggatctggaaattctcttaaaattgtctatgcccacctaacccctggataccactgaagtttagagactgttgaaataagcagtgcaatgctatgaaatgaatgctatataaccattagggagtaaaatatatgcatattgacgtggagagacttctgagacattactccatgaaaaaagcaagtgttaaaagtattttatatatagtatttaattatatgtgtacatttcatatatgtatgtcttaatgttttttccatgagtaaaagggagacatggaaggctgctcaccaaaccataaacagaacttaacctttttgaaagggggcctgggaatgtgaggaagatgaagagagatttcatggtttattctgaatattcatgtattctttgaatcttttatagttgagaatacgttgtattactagtgtagaaaaaaatttaaagatgtttcataataaaagagaaaaaccactgtactaaatgatctctaagctcaaaatttgaggaacactggcagttactgtgatgtagttgtctatgttaaaatatttctaattcatatactaagtgatttttatttaaattcttttgaaatattttttaggtgtggaatatcaaacaaatgattaagttgacacaggaacatatagaggccctattggacaaatttggtggggagcataatccaccatcaatatatctggaggtaagcttttgagtatcatatctagtaattttgaaaagaaaaaaaatgaacttataaaaacatttgtactgataatcttgattattttaggaggtgggattaggaatagatttgggaagagagaattagctttgcctgtattatacttcttaatcttgttttgtgtcacttgttaaaataaacatgtattttataatttagaaaacatcagaactaagggggaagtgatataaatttcaaggtattactctgaattaaatttttatttttatttttattttatttatttatttttttttgagacggagtctcgctctgtcgcccaggctggagtgcagtgacacaatctcagctcactacaacctccgcctcccagcttcagacgattgtcctgcctcagcctcctgagcagctgggactacaggcgcacattaccacgtccacctaattttttctatttttagtagagatggggtttcaccatattggccaggctggtctcgaactgactttgtgatccacccacttggcctcccaaagtgctaggattacaggtgtgagccactgtgcctagccaattttttttttttttttttaaagagaaagcacacagttttggagctcagcaaaccagttaccatattggaaaatggggtaattttttaaaatattttttccagaatgagtttccccaaaattggtttctgcttccttataggtaaaatttgtaatttttaaatagctcaacattgtttagctttactgtttaataatgccttgaggtttgtgtcaagccttgagcataattgtaaatttatattcattaatcctatgagttagtaggtgctgttataatcacagatgagctttcttagcattagttttcttaagtagtcagtcagactccacagccaacaaggtgttacagaatctaggtggtaaggctctacagcccacactgctcactactaccctacacaccctttctttataaaagctggctcagctgtcatcactagtgaggcaaggagatggagaactctaaattagaaatgatcaggttgccatttggctccaaataccagagatttttaagcacagattgaaagacttctgaactaaatttgtaacttagtaatttaattactttttgaagggccagttaagtcttaaggattttatgagaaagttaagtttatatttctgaagtaaacttggaagtttggaaataacagctaatatgctgttttctttctcctcttcttcatgtggctcatcccagatcacactcctagttaatatcaaagctaggactagaattcttatttctcattactagttagtgtacttcctaatagcctgtgctatcttctatacatatattattaggaggctgatcaaaggtgtcataaggaagcaagtactgctaatgagaatggcaattttttattaatcagaattagacaatataaccagcagtttttcttccaaccatttctatgtcttggagactttgaacccatgctgagatgtaattcatttgcatcaatagctatgtccccactatagcagtgattcactgccccctcctcacataactcttcaggctttttactatttgaagactgatcactaacaacaaaccttagagcttcttattctgtgcccagtactgtgttaaatgtattttattgcttaactcatttcttatagttactttgagcaagatactaggtactggatatttttgttattcccattttacaagtgaaaaaacagagaggttaagtaacttaactaaggtgacactgctagttaggaaagaaggcagatatctaagtcagaaatctgtgttcttgatctctatcttattctacctttatcatgacattgtctcgctctttccccaccctcaccccccagacagcttttcttatttgggctaaatatttctattcccttcagccattcttagtaacataatttatggaccttttattagatacagtctttttggttggttcttttagaattagacacacaaaattgaactacttattaaaattaaatctgagtaggacagcatacatcagaccataactcacaggttatattattagcttgtggtaaaacagattcttatcttggggacttgtggtatacaatgtgtgtgtattatgtgtatgtagtatgcaaaggtatgcatatacacatgtacatacacacacactgaaggcagcagtataatataataattacgatgagccatggagtcatacagactccatgtttgaatcccaactctggcttagtttctgtactcaagatatccagccttcttataccccacctcattagtaaagtggaaataatatcacatcttgggtaagttaaggattaattgagtttataattatgaaataacatagttcctgattcaaatattaagaattctataaatagttgatttatcttgtactgctctaggccttggggaatagcaattgtctgtctttttttttttccccctgagatggaatcttgctgtctcccgggctggagtgcagtggcacgatcttggctcactgcaacctccacctcccaggttcaagcaattttcctacctcagcctcccaagtagctgggattacaggcatgcaccaccatacccagctaatttttgtgtttttagtagagacagggtttcagcatgttggccagtctggtctcaaactcctgacctcaggtgatctgccccccttggcctctcacagtgctgggattacaggcgtgagccaccgtgcctggccgggaatagcaattttttaaaaaatggccaacaatctccgcctttttaagcttatattttaatgaggggatggatatatagacaatgaacatataaatgagttttagaacattgcacttatcaccattttatttttttattttttgttgagatggagtctcgctctgttgcccagtctggcatgcagtagcacgatctcagctcactgcagcctcctctcctgggttcaagtgattctcctgcgtcagcctctcaagtagctgggattacaggtgtgcgttatgactcccgactaatttttgtatttttagtggagacaggtttcaccatgttggccaggcttgtctcaaactcctgacctgaagtcatccacctgcctcggcctccctaagtgctaggattataggcgtgagccaccgtgcctggccatcaccattttatatactatgaatggactctaaccagcccaagagaaaagacctgtacatactgatatttaaaggcccatcagtgaagagctagatctactgattactcactgagacccaccgttctgcaggtttctcatctgccatttaagattcctttacactttttttttttattggggtaaaatatgcctaacaaaatttaccattttaaccatttttaagtatatggttctgtggcattaagtccattcatgtttttgtgtatccttcaccaccatccatttctagaaattttatcatccaaaactgaaactctctagcctttaaacactaaatctctatttccttctttctctagttcgtagcaaccaccattctactttctatctctatgatctatgaattggactactctaggaacttcatgttaatggaatcatataatatttgtccttttgtgactggcttatttcatttagcttaatgtctttgaggtttatccatgttgcaacaaggataatgcatatatcaaaatttttttcctttttaaggctgaataataatccattcattgtatgtatttaccatattttgattatccattcatccatcagtggacacttgggttgcttctacgttttggctattatcaataatgctgtgaacatgggtgtacgagtatctgagttccttttacttctttggggtatataccaggagtagaattgcaggatcacatggtgattttatgattattttttctggagttgccacacctttttctgtagcacctgccctgttttatattcctactggcatcgcatggggttctaattttttacatccttaccaacacttattattttcggttgattaaaaaaaccatagcctaggctgagcgcggtggctcacacctgtaatgccagcactttgggaggctaaggtgggcggatcacgaggtcaggagtttgagaccagcctgactaacatgatgaaatcctgtctctactaaaaaatacaaaaatttcaggtgtgtgtagtggtgcgcacctgtaatcccagcaattcaggaggctgaggcaggagaatcgcttgaatccaggagaagaggttgcagtgagccgagatcatgccactgcactccaacctgggggacagaataagactccgtctcaaacaaaacaaaacaaggcaaaacaaaaaaaacatagcctcatgtgcgtgaagtgataccttattatggtgctgatttgcattttcctgatgactaacaatgttgagccttttattatgtgcttattggccatttgtatatcttttttgagaaatgtctgatttaagttcttggtccattttttaattggattgtttgttttgttcttgttattgagcgtagttctttatatagtctagatatcagttcttattggatatttaatttgcaaatatttttcccattgtgtgggttccctttttactctgcttatagttttttagtccaaattatctatttttctttttgttgctcttgcctttgatatcatatccaagaaatcatcaccaaatccaatgccatgacattcttctcccaaatgctcttgcatttgggtctttgatccattttgagttaatttttatatgatgtaaggtaagggtccaacttcgttcttttgcatatggatacccagttttctcagcatcatttgtggaaaagactgaatggccttggcacccttgtcgaaaaccatttgactatatatgcaagagtttatttctgggctttctattccattggtctatatgtctgtctttatgctgtcatcatactgttttgattacactagctttgtgtagtaagttttgaaatcaggaaatgtgagttctccaactttgttctttttcaaaattgttttggctattcaggatcccttgagattccttttttttttttgagatggagtctcactttgtcacccaggctggagtgcagtggtgtgatcttggctcactgcagcccacctcccaggttcaagtgattctcgtgcctcagcctcctgagtagctgggattacaggcacctgccaccatgcctaccttttgtatttttagtggagacggagtttcaccatgttgaccaggccaatctcgaactcctgacctcaagtgatccacctgccttggcttcccaaagtggtgggattacaggtgcaagccactgtgctcagcctccatgtgaattttataaaggatgtttctctttctacaagtaggtcatcaggattttgatagggattggattgaatctgtagattgctttggttaatactgatatcttaagaattcttaactctgaaatatgagtggacagttaagaataaccagatatttaaagaaagctgtcaacaggaaagacagcagcagaaatggtcaacagaaactcagaaacagtgcagaaaacagaataaaacttaaaaataactataattagcatcagagataagatctattagtcctgtcttgctttgtagcaatactaaagaagcaaaagtaacagagaacaagaaagacctcttggaaattaaaaatacaatagccagaaatttatttttatttttatttttttttaattttctttttaattctcagcaaggcaagttacgtctatagaagggtgcgcccttacagatggagcaatggtgagcgcacacttggacaagggaggggaaggggttcttatcccatatgcatgtggctcttgctgctgtgtcattcccctgttggctagggttagactgcacaggctaaactaattccgattaataactagaattttttaatttttattattatttttctttttttgagatggagtcttgctctgtcacccaggcgggagtgcagtggtgcgatctcggctcacttcaagctccacctcccgggttcacgccattctcctgcctcagcctcccgagtagctgggactacaggcgcccgccaccacgcccatctaattttgtttttgtatttttagtagagactgggtttcaccgtgttagccaagatggtctcgatctcctgacctcgtgatccgcccgcctcagcctcccaaagtgctgggattataggcatgagccactgtgcccagcccagaaatttttaaaaatatatgtatatacagacatataggtatgtacatgtgtatatatgtatgtgttgtatatatataaataaatgttgaaaaataaatattggaagataaatgttctagaaagcagagtaaaagcagagagatgggaaattttagaggaaacatgagaaaaattaaggaataaatcccaatccataaaaattataaatgcgtttaactgcaagaaacagaacccttcaagaataagtttctggaacaaatagggattttcatttcctttcacatagcaagaagcgtagaggtaaattattgtaagactagttctacacaggtcagttgtcagatacttggttgaatcgctatagtccctttagcttttctgtcaagaccacagcagatttttaagatctttccctcatacaactcctcaaagcagaaagcagagaacagagaagttctcttgtatactaagctcttgctaggaagaaaatctttctcaaaaatcctctataactcttccttttatatctcattgactagaatgaggtcacatatcacccctatactagtgactatgcttacatttcctgaagtaagagtctaataagtcaaaaatttccagtgttcagtttttcttcagattagtttgtatgctgtcaagtagaagttgtgctatgattattttattctataacatttcaacagaaaccccttttaagtttctataggaagataaatcttcaactacttattcttgcttcttctcttcattgtagcaaaacagagaaattggttacaccaccatcagaaatcctcttgattttctttttcccacgtactaatttatttaaaagccatcttttcagttctagatgttctcctactggcagataacagttaacattctattgattcccttgatgataactacagtgaaatatgagatacagtactctaaagaatttcaaatttgtcttctcagttgatctttggttcccttttttctaccatcatccaaaggaagaaaagataaatttactctgaaaagttgttccccagagtttcttcatttcctctcagtgtttccatattcatttatccaacaaattattggaatgccttctatgtgtaagatataatgctagatgcttttctagtagtagattcttctttctgtacttgatttattggagcccagagatgaagggatactgtctctgtaatcaccctacagctgagtcctaactacttcagaatttatggttgaatcctacagtcccctgtagactgatgaagacagtaacagctcctgacatttactgagtatttactatgtatcaggtactaatcatatattagttcatttaatcttcagcctaccctttgagttacacttaactattctcattttcattttataaatgaagcaattcaggcacagagggatttaataatatggccaaggttacacaacttgtaattggtagccaaggtttgaatcccagacattctgaatttacagcccatgcgtttaatcaccgtatcattcttacacttggcagcctttctgatttttagtctatatagaacctagaataatacagaggcattgtgtcaaacccttcaatgaaattaatactggaagctggatgcttcctgtggaatgcagaacagtccattatatatcatttatgggcagtttgtaagatttcattgtatcttgtgagagtaagaataattagactaaatttaattaactaaatgataaaaaataaaatttttatttcgctgctttttctcattacattgaaattaaatagatccttagatttttttcccttctgttttaattgagaaataattcacatactatacgattaactttttaaaactgtgtaattcagtggtttttactatattcaccactatcttattccaaaacatttttatcactccccaaaagaaaccctttatgcattagtagtcattccctgcagcccctgacaaccactgatctactttttgcctttatggatttgctggttgaaatatttcatataaatagaattatattatgtggccttttgtgactggctgcttttacttaatgtaatgtttccaaagtttgtttatgtagtagtatgtatcagtacttcatttcttgttatggctgaatatttcatcatacacatatatcatgttttgtttatccattcatcaactgatgaacatttgggctacttatatgtttttgccattatgaataatgccaccatgaacattcacgtgcaagtttttgtgtagatatattttcatttttcctggctgtatgcctaggaatagaattgctgggtcttgtggtaactctgttttacactttgaggaactaactgccagacagtttttcaaagttgctgcactattttgtattcctaacagcaatgtatgagggttacagtttctctccatcctcatcaacccttgttattatctatttgtttttttaattaaagccatcttagtaggtgtgaattggtatttcatttggttttgatttgcagtttcctaatgactaataatatagaacatcttttcatgttcttgttagccatttgtatatcttctttggagaaatgtctattcaaatcctttgcccacttaaaaaaactgggtttgtccttttattactgagttgtaagagttctttaggccaggcatggtggctcacacctgtaatcccagcactttgggaggctgaggtggatggatcacttgagtccaggagttcgagatcagcctaggcaacatggcgaaaccccgtctctacaaaaaatacaaaaattatccaggcgtggtggtgcatgcctgtagtcccacctgcccgggaggctgagatgggaggatcgcttgagcctgggaggcggaagttgcagtgagccaagatggcagagtcacccaggctggaatgcaggggcaccatctcgactgactgcaacctctacctcctaggctcaagccatcctcccacctcagcctcccgggcagctgggactacaggcatgcgtcactgtgcctggataatttttgtattttttgtagagatggggatttgccatgttgcccaggctggtctcgaacacctggactcaagcaatcctcccgccttggcctcccaaagtgctgggattacaggtatgagccaccgcacctggccaggagttctttatatattctagatagtagatccatgacttgcaaatattttctcccattctgtggtattttttcccactctttcaattttgtcttttgaagtacaaaagtttaaatgtggatggaattccaatttatctattttaaagtttaaatgtggatggaattccaatttatctattttctgtggttgctgtgcttttggtgtatcatacatgagagaccattgcctaatcaaaggtcaggatgatttactcctgtgtttttttcctaagagttttatagtattagttatatagccaaaacaggtttagttgcttgctgcctgcagagtccaattagtaagagcaaagtctagtataaagtgacttttttattccaaagttagcttaaaggaagaagacgtacaggcttcctgccttaagggtactgcttccctgttggagcagaaagtgggtgcttttaaagaaggtgcctacacgggggcagaaatgagcgggtggaagatctgcatattcccttcggtgccttctttctcaggcagtcaagttggtggcttcatgggcaaaaatacctcagaggtggctgaaaactctagcagtcttacttttggttgtagatcaactattacctcttgaggcaacttcctgacgggtgagagttccactcaggattgtctaagcacataattagatcaacttgccttgtagggaatgtctggtgaaaaggagataaaaggccataattgcatttcttttattcttttatctttttctttttgaaacagaatctcattctgtcactcaggttggagtgtagtggcatgatctcggctcattgcagcctctacctcctgggctcaggcgatcctcccgcttcagcctcctgggttgctgggactatatgtgcatgccaccatgcccagccaagtttcatattttttttagagatggggtttcaccatgtttcccaggctagcctcaaactcctgggctcaagtgatctgcctgccttggcctcccaaagtactgggattactggtgtgagccaccacccctggcatataattgcatttctaaagagctaagtaggaagtggggaggaggaggaaagaaaaaaataattaaactttttcttagaaaaatgagggtgctcaattatataatagatatgtgacccattttgttttgtttttaatttttgtaaagatggagtctatgttgcccagtcaggtcttgaactcctggcctcgagtgatcctccagcgttgacctcccaaagagctgggattgcaggcgtgagccaacatgcctggcctatttcgagttagtttttggatatgttgtgaggtagtagcccaacttcattcttctgtgtgtggatattcagttgtaccagcgccagttgttgaagagaccattctttctgcattgaattgtcttgctggctttgtaaaaaaaaaaaatcaattgactgtaaatgtaaggttttatttcttgttctattgagaaataattcacatactatattattcacttttttaaagtgtgtaattcagtggttcttagtgtatttacacaatggacaactgtcaccactatctgattctaaaatatttttatcattcccacaaagaaacccttcatgcattggaagtcattccctccagcccctgacaaccactgatctactttttgcctttatggatttactagttgtaccttgttctattctgttctatatgtgtgttcttattccaaaattattgcgctgtcttgattactatagttttatagttaagttttggaatcaggaagtataagtcctccaacttcttttttcttttataagattgttttgataatttcaagtccgttgtatttccatatgaattttaagatcagcttgtcagtttctacaaaaaaaaattgagattttgagaaggattgcattgaatctgtagatcaacttgggaagcgttgtcattttaatgatattaagtcttcttagattcttttttcttttttgagatggagtcttgctctcgttgccaggctggagtgcagtggcgtgatctcaactcactgcaacctccgcctcccaggttatcaattattactaatacaaatatttattggatttttgctatgtggtagtctctacaataatttgttttacttgtgttatctcatttaatcctcac

SEQ ID NO: 203 - DNA, 2510 bp, Homo sapiens
cgcctcccggccccctccccgcccgacagcggccgctcgggccccggctctcggttataagatggcggcgctgagcggtggcggtggtggcggcgcggagccgggccaggctctgttcaacggggacatggagcccgaggccggcgccggccggcccgcggcctcttcggctgcggaccctgccattccggaggaggtgtggaatatcaaacaaatgattaagttgacacaggaacatatagaggccctattggacaaatttggtggggagcataatccaccatcaatatatctggaggcctatgaagaatacaccagcaagctagatgcactccaacaaagagaacaacagttattggaatctctggggaacggaactgatttttctgtttctagctctgcatcaatggataccgttacatcttcttcctcttctagcctttcagtgctaccttcatctctttcagtttttcaaaatcccacagatgtggcacggagcaaccccaagtcaccacaaaaacctatcgttagagtcttcctgcccaacaaacagaggacagtggtacctgcaaggtgtggagttacagtccgagacagtctaaagaaagcactgatgatgagaggtctaatcccagagtgctgtgctgtttacagaattcaggatggagagaagaaaccaattggttgggacactgatatttcctggcttactggagaagaattgcatgtggaagtgttggagaatgttccacttacaacacacaactttgtacgaaaaacgtttttcaccttagcattttgtgacttttgtcgaaagctgcttttccagggtttccgctgtcaaacatgtggttataaatttcaccagcgttgtagtacagaagttccactgatgtgtgttaattatgaccaacttgatttgctgtttgtctccaagttctttgaacaccacccaataccacaggaagaggcgtccttagcagagactgccctaacatctggatcatccccttccgcacccgcctcggactctattgggccccaaattctcaccagtccgtctccttcaaaatccattccaattccacagcccttccgaccagcagatgaagatcatcgaaatcaatttgggcaacgagaccgatcctcatcagctcccaatgtgcatataaacacaatagaacctgtcaatattgatgacttgattagagaccaaggatttcgtggtgatggaggatcaaccacaggtttgtctgctaccccccctgcctcattacctggctcactaactaacgtgaaagccttacagaaatctccaggacctcagcgagaaaggaagtcatcttcatcctcagaagacaggaatcgaatgaaaacacttggtagacgggactcgagtgatgattgggagattcctgatgggcagattacagtgggacaaagaattggatctggatcatttggaacagtctacaagggaaagtggcatggtgatgtggcagtgaaaatgttgaatgtgacagcacctacacctcagcagttacaagccttcaaaaatgaagtaggagtactcaggaaaacacgacatgtgaatatcctactcttcatgggctattccacaaagccacaactggctattgttacccagtggtgtgagggctccagcttgtatcaccatctccatatcattgagaccaaatttgagatgatcaaacttatagatattgcacgacagactgcacagggcatggattacttacacgccaagtcaatcatccacagagacctcaagagtaataatatatttcttcatgaagacctcacagtaaaaataggtgattttggtctagctacagtgaaatctcgatggagtgggtcccatcagtttgaacagttgtctggatccattttgtggatggcaccagaagtcatcagaatgcaagataaaaatccatacagctttcagtcagatgtatatgcatttgggattgttctgtatgaattgatgactggacagttaccttattcaaacatcaacaacagggaccagataatttttatggtgggacgaggatacctgtctccagatctcagtaaggtacggagtaactgtccaaaagccatgaagagattaatggcagagtgcctcaaaaagaaaagagatgagagaccactctttccccaaattctcgcctctattgagctgctggcccgctcattgccaaaaattcaccgcagtgcatcagaaccctccttgaatcgggctggtttccaaacagaggattttagtctatatgcttgtgcttctccaaaaacacccatccaggcagggggatatggtgcgtttcctgtccactgaaacaaatgagtgagagagttcaggagagtagcaacaaaaggaaaataaatgaacatatgtttgcttatatgttaaattgaataaaatactctctttttttttaaggtggaaaaaaaaaaaaaaaaaaaaaaaaaaaaaaaaaaaaaaaccc

SEQ ID NO: 204 - DNA, 2298 bp, Homo sapiens
atggcggcgctgagcggtggcggtggtggcggcgcggagccgggccaggctctgttcaacggggacatggagcccgaggccggcgccggccggcccgcggcctcttcggctgcggaccctgccattccggaggaggtgtggaatatcaaacaaatgattaagttgacacaggaacatatagaggccctattggacaaatttggtggggagcataatccaccatcaatatatctggaggcctatgaagaatacaccagcaagctagatgcactccaacaaagagaacaacagttattggaatctctggggaacggaactgatttttctgtttctagctctgcatcaatggataccgttacatcttcttcctcttctagcctttcagtgctaccttcatctctttcagtttttcaaaatcccacagatgtggcacggagcaaccccaagtcaccacaaaaacctatcgttagagtcttcctgcccaacaaacagaggacagtggtacctgcaaggtgtggagttacagtccgagacagtctaaagaaagcactgatgatgagaggtctaatcccagagtgctgtgctgtttacagaattcaggatggagagaagaaaccaattggttgggacactgatatttcctggcttactggagaagaattgcatgtggaagtgttggagaatgttccacttacaacacacaactttgtacgaaaaacgtttttcaccttagcattttgtgacttttgtcgaaagctgcttttccagggtttccgctgtcaaacatgtggttataaatttcaccagcgttgtagtacagaagttccactgatgtgtgttaattatgaccaacttgatttgctgtttgtctccaagttctttgaacaccacccaataccacaggaagaggcgtccttagcagagactgccctaacatctggatcatccccttccgcacccgcctcggactctattgggccccaaattctcaccagtccgtctccttcaaaatccattccaattccacagcccttccgaccagcagatgaagatcatcgaaatcaatttgggcaacgagaccgatcctcatcagctcccaatgtgcatataaacacaatagaacctgtcaatattgatgacttgattagagaccaaggatttcgtggtgatggaggatcaaccacaggtttgtctgctaccccccctgcctcattacctggctcactaactaacgtgaaagccttacagaaatctccaggacctcagcgagaaaggaagtcatcttcatcctcagaagacaggaatcgaatgaaaacacttggtagacgggactcgagtgatgattgggagattcctgatgggcagattacagtgggacaaagaattggatctggatcatttggaacagtctacaagggaaagtggcatggtgatgtggcagtgaaaatgttgaatgtgacagcacctacacctcagcagttacaagccttcaaaaatgaagtaggagtactcaggaaaacacgacatgtgaatatcctactcttcatgggctattccacaaagccacaactggctattgttacccagtggtgtgagggctccagcttgtatcaccatctccatatcattgagaccaaatttgagatgatcaaacttatagatattgcacgacagactgcacagggcatggattacttacacgccaagtcaatcatccacagagacctcaagagtaataatatatttcttcatgaagacctcacagtaaaaataggtgattttggtctagctacagtgaaatctcgatggagtgggtcccatcagtttgaacagttgtctggatccattttgtggatggcaccagaagtcatcagaatgcaagataaaaatccatacagctttcagtcagatgtatatgcatttgggattgttctgtatgaattgatgactggacagttaccttattcaaacatcaacaacagggaccagataatttttatggtgggacgaggatacctgtctccagatctcagtaaggtacggagtaactgtccaaaagccatgaagagattaatggcagagtgcctcaaaaagaaaagagatgagagaccactctttccccaaattctcgcctctattgagctgctggcccgctcattgccaaaaattcaccgcagtgcatcagaaccctccttgaatcgggctggtttccaaacagaggattttagtctatatgcttgtgcttctccaaaaacacccatccaggcagggggatatggtgcgtttcctgtccactga

SEQ ID NO: 205 - DNA, 63294 bp, Mus musculus
  misc_feature (3478)..(3794): "n" at positions 3478 through 3794 can be any base.
  misc_feature (7386)..(7433): "n" at positions 7386 through 7433 can be any base.
  misc_feature (9273)..(9758): "n" at positions 9273 through 9758 can be any base.
  misc_feature (11328)..(11347): "n" at positions 11328 through 11347 can be any base.
  misc_feature (17356)..(17375): "n" at positions 17356 through 17375 can be any base.
  misc_feature (21543)..(21986): "n" at positions 21543 through 21986 can be any base.
  misc_feature (30816)..(30835): "n" at positions 30816 through 30835 can be any base.
  misc_feature (49223)..(49242): "n" at positions 49223 through 49242 can be any base.
  misc_feature (61489)..(62638): "n" at positions 61489 through 62638 can be any base.
tgttcctgtggctttcaggaacctaagtcaggtctcaggcatgttacaccaattacctttgcactctgagctatcttgctggttccctctttatttttgtttattactttaaagtaattttcccccctgagatacggtttagatatatagccctggctagcctggaactcattgttgatcaaattagattcaaattcacagagatcagcttgtctctgcctccccaccgacagaattaaagacatgtgccaccagcccaggctttctctgttttaattgcatccatttattgactcgcttgtatgttggtgtgggtgctccattatggggttggaatggataatgaagccaggaggtcaagagcatatgttaggggatgtatcctaaagccttgcttagcagaacagaacactatttcactagaatcttttgtaaggagtagaaggcaggatactgctgagaggggttgtgcagtggtaatgggcacctgttctgtaactacacaggccaaagtgttaaccctgatcttccacaaaagtcactcctgcctaggtcttccttcagcctcctctgtcaaaggggagagaaaaggctggctcctctatggaatccatggcttaacctctgtagactgccgagccatttcatactggacccgagcttggcctgccttagtaaatttaggagtcaaagatagaagaattggaagttcaaggccaggcttggctctaagagatcccgtctcaaaacaaaacaaaacaaaacaaaacaaaacaaagcaaaaccatggggctggagaatgactcagtagttaaaagtgttcactgttcttgcagaggactggagttcaggtcccagcactcacagcaggcagctcatagctacctgtaaacccacgttccatggatctgatgccctcacctgatcttcaacagacacctgcacacaagtggcttacatacctcgaatgtgcacactcacaatgtaagactgatgataaaaacaaagaaccctgaacttgagctatttattctccataatagttctggagggagcggtacccccatttctctgtcaatagttctaggagtgaactctcgcctcccccctcccttgttgggctgttacacaggagtcggtactgctgaatgcaagcaaacagactctttatgtgtgaagagagcacaagggctggtgatgtggagcacccaggacacatcgccactcgtggaactacagccctgctcataccaagactacagcagtcataccaagaacctctacactgatgctaggaagttcagaaacccaagccccaggaatccacctggccccccaaaagaactttaagagaagttaacctacatgacaagataaaaatcagagctattctgatagaagatgtgtgtgtggggggggtttgggggtgggggtggagagggtgtctctgaggttacaatcactacttccccatcttctccctgcactatcatcttttaaaggtcccaggatttccccggagctctgtttggaaaccctgactggtttacggaaagaatcagtttcaatgccagaagacctgactttcaccaccatgatctccccaccatgaaggactagaccctcggaatggcagccaaatataaatccctccctccttatgttgcgtttttctttattttgtcatggcaacacaaagtaactactctggaatatgcaagttacctagctttagcactattaggggtaggagccatgtgacaccctgctgtggtggcttttcttggcactgtagtatactcagaagccttcactctgactacctgagttccattcctaggacccacagggtggaaggagacaactgactcccagaagttgtcctctgacctccacatacacactaacagagaaatggtgagagaaattaaacaaattattattattattatcattatgaatcacaaccagataacagtgcacccctattcttgagttatgacaacaaaaaaagtctctggatattgcctaatgtcccctagagggcaaaatgaccctcagttgagaactagtaggtacgcaaacttgatatgcaatcaaactgtcactgtgtatgcatgacaaacacatttgtaaatccacttataaaaggacagaaagagggtagaacttgaaggggagggaagctgtcaggtaaataccctctctctttcctccaactgcagctcagtcccaccatcacagagcatgcacacggggccacagttctgtaccagcctttacccaggcttcatgcttccctgaagcaccccttccccagcctgccccacgccactggcatgggtaattcttctccacccttgctaagatggatgcgttaataccagcaaactatttcttaatctcctaagcctcagctttgaatctttaaaaaggaaagagaaacggcacaaatctcttaattaggacgcccaatcacttcgataaatatttacccggttccagcatgaggcatggaaacccggcgccattagtcaatagaggtcagcaaagtgcaccttgggaacagcaggatgcaattcagcctagcttgggaggaggtgtcaggagaatgtttccagtctcgggctcctgctaaagacaggtgaacaaacacattccatacctactgctgcacacctgccccgcaccaagtcccaggtggacatggcagcctatttgtaaaccatcacctggtagtctggttgcctttgctttctggacagaggtagtgaagctaccgagcagatccagtattctgggactctccagagagtcctagctgtgctgctttggtaggtattattatctggaacgctactctcagtcaaccaaggtcacagcacttcccaagcagctaccctcattgtcaactccaactcttctgcccagtatttcctgcattgagttctaacactgcggctctacacatagcctagccttgtctatccaaaggcaagggcttctctcacattctggtaagctcttggttggactaacacccagacaccattcttcccattttacagctgtagaaacagagactgaagaagtggactcttcactcctgatctaaataaatagcctttggggacatcctccactggatgagaagtccaagataggtgtgggatgaggatgagggttggtttgtttgtttattggtgttttgttttgattttagagaagccaggttcttccttcctcaggaccaagtgacagcctgctaggcctaagagaacggctctaaagaaggaaggctaccttggaaggctgcaggagagggaaggcttctcttggtctcctccgcctactagagaacttttgtctacactcctgggctgagctcgaacccaatctttccaaaaggtcctcttctcactactcgaatttccctctgaatcagactactttatacatcttatgaactcgctggcannnnnnnnnnnnnnnnnnnnnnnnnnnnnnnnnnnnnnnnnnnnnnnnnnnnnnnnnnnnnnnnnnnnnnnnnnnnnnnnnnnnnnnnnnnnnnnnnnnnnnnnnnnnnnnnnnnnnnnnnnnnnnnnnnnnnnnnnnnnnnnnnnnnnnnnnnnnnnnnnnnnnnnnnnnnnnnnnnnnnnnnnnnnnnnnnnnnnnnnnnnnnnnnnnnnnnnnnnnnnnnnnnnnnnnnnnnnnnnnnnnnnnnnnnnnnnnnnnnnnnnnnnnnnnnnnnnnnnnnnnnnnnnnnnnnnnnnnnnnnnnnnnnnnnnnnnnnncccccccacacacacacgcagaggaaatgggccagatgctgtattcccccatctgttagtacttcatcagggctaccatagctaactgttattgatcacttaatgtgccagggctataccaagtagtacttgaacaatctccattgatctgggaaagcaatagtccaaggtgggcagggccattattctcttcactcaacagaagaggaaatagaggcttagaaagagttcacaagtgccccaaagtcacaaagcttgacccagctagagagttggaagagggtttaagagactgtgggaagtcccttcaccaccaggagccacagccctctttgctgaagtgagctaggctcctcttactgccctgactggcagggcaagtgtcattaagttgtggactctggagctgagttgcctggactcaagtccatcaacccccacagtgaccttgaggaagtcattgtaccttggagtagtatcaattgcccatctgctcggtcgggggaatgacatcagtggctctaccctcattctttgggtgaggattaaacttgttaatatttgcccagcgcttagactggaatctggtgcagagtgagcactatgttaagtttgttaaacaaataacaaactccccttctggccccatagtgaggcgctagcctgtagaggaagatctgggattagtgatggatggggttggaggtggggggaggttgtgtgtctgtgtgggatgaactttccttagcaatgaacagggcagaagaaggggaccacagaatccaccaaagagaggtggctggccttgaggaagaagactctcttttttgggccagctccaacaagaggcttcccaaaaatctgggccagtagctggtgggggttgggaatgacaggaggggaggtttacaaccccaccctaggccttgagatcagttcctcaaaggataggccacagtctggtggctagccagaagccatttttcttaattccggaaaaaaaaaataacacttgtctaacgtgttttggatttattttgaaggaaccagagaagcatctctgtccccacctcaagttcccacagtcatcttacatcccaaatgaggagctgggggccttccgctgatgcagatccatcccggactttccagctcaccgcgtgactttttttttttttttaatgtgccaggaattcctctcccacgtggggtggactccgaggtactcaattaagcagccaatgaaaagtcagctctccggtagcaaatgaccctgacacttcttgtaacataaacagttgaaacgcttccaattagaactggagacagagctgtttgaagtctttttcttcagtcccctccttctttaaaataattgtcaagcgcttcggacagtgtgttgtgtgcatctttctctagcataaaataagctcatttccatttcttacaaaatttgtgaggtggcatgggggtggggttctgagcagtagtgagttttgagcttaagggacctgaaccaagttaccaagggccctgcttccctttcaggctctgggttctggttacagaagaaggaagaagaaggaaaaaaaaaagccgaggtgatacggtgaactgggagccagaggctcctcaaccataccttcagagagggttagaatgaatgaatgagtgaatgagtgaatgaatgtctttcagtaaatgctcatatagattcggcttgcacaaacaaaggagtttggccgtggatctggctgtcctggattccaattctctctgcctagctcgcggcctattactaagctttgtttgtgtatcagcccctcttctactctataagacgggccgtcagccaggccttgggagtgaagtgaggacgtactgggtaaccatggccgctttgtacctattaaacgctcaagggctgtccttccacacagtggggagcgctgctgcaagcagttcggctctgccgtgggggcggcgctcggcaaaaccgcatccatcacgctcatcatccgtgtggcaggccgggtgctggcgcctgggttcacaggagaactcaatgtgaagtctgccttgcactagctcacgctgactagtggggtccttgggagcatcactgccctggcaggagacgcggagaccagagacagagctgcggcgcttttctgtacacagtccgcatagacaggacctgaaagcccaaggcatcggcggccgccaggaggagggcgccgtccgacccagtccggagggagacggaggagagagaggccgagtaaggcgccttggcttgggcatcttgaaggcattgtgtttaataaatctgggcgaaaagcacacccgctcttctccccccccccttttctcggctcccaaatcaagacctgctgtacgacccccagtttaaggggtcttaaaacccctgcactttgattagcagcttcaaagagatccctttaaagttccccttcttccccaacctcacctctcctcgacacccatccccccccagcactcctaagaccagaacaacaacaacaaaactaaatgcaagtttaaaggggggcggtggagatggaaaatctcagacttcctcctgaacgcggcccatagaaattacctatttcagacgtgcgcaggagtaggaacaccgtggagtttgggttttgattttcttccttttttttctttctttctttcctttttcttcttcttttttttttcttcagggtttgtgtgtgtttttaccttttattatttaaattgatacgtttcattactagggagaaaaataaaatattcctttgatacacaaaatcaaattgatatttagcctctgcttacttttttatgcatggctcctttataccacatggtagtgacagattgtttgagctggaaggaaaagccattcaaagctaattaagcagccattccaagcactatttgcaagcgggaggctcagaagcctcggcatttgtcagcgctcccccacccctcgtggttttgactgacagctctggctaaggactgacagctctcggaatctccaccaattactagtcgagagtctctttgctggtctgtgattgggttttagacttgctcgggggcgtggccggcgcgccccacgtgggggctggagcgagaaaggggcgggccgggtaggaagcgggtgcgcccacccgtgacgtaagggggagggcagagaagggggaggggagagggaagctccaaagaggagccattttgagactaatggatgctttggccagatgctcgcatctgtcgagctaggcttctccctgccccctcccccttttcggtgcgcatcgtacacgatttatgtttttatttaggagaataaataaatgaagaggggagcgtggtcgaggccggagcgggcgctgagaggctccatctcggggcggccgctcacgtggaggtccccgcgcgctcccagctactcattaagatgcaaacgcgaaactcaggctcctaatgaggggaaaatatagattccgggggcgcgcggccggctcgcgcgcgcccgcaacgggccaggagcgtgtgcttgcgtgcaagnnnnnnnnnnnnnnnnnnnnnnnnnnnnnnnnnnnnnnnnnnnnnnnnacctgggcggcccactcggcgttggttctccgaggcccgcgggacctagggtgggcagtgtgccctgaacgtgacccttgtctgcgagcagatgggccccagagtcgaatatctacgcctccttgggtgtctatgctggtgaccagggacgctccaggctcgcagtcgctcttccacgggtggctgccgatgcatgtgcccaggcaggccatcaggccaagaaacggggtcggaactctgggttcgtagccaggagggccccaactccgtgctttcccttcttcaccatctcgggcccggagcactgctgaaggaacccgcccttggcaaggctgcggccaggacgtagctgtccccaaagggcaagagccccaaatggggctagccgcactactgagcctgttgtccgcagactgccaggcccttccatctgcgcggcccgccaagccagagttctcagacttccccctcgccggcagccgccttgcatcagaggcgctgtttatttggctttctgaaaagaagggcgaatgaacaaaggagaaaagcggggcgcccaagggtgggagagggggcagaaacggataaaagaaagagaaactcagtttggagaacagtcttagaggtcggaggtaactttgggtgccagcattttatcggtcctaaatcttttgaagtgaaaacattaaactgacaaagtgattctgtttgttttatagtatctaattgggctgctttgcaaccctaatgagattagaggggggcaatcgttcgccgcctctgcagaatcaactgatccattactaccagccacaggttttaaggattgtacagcttgtccttttttcccccccttttgttgttactcgttttctccttctcccctcccgccaaataattatttgctagtagatcgtgggaaaaaaagaagaaaaaaaacctagcagcccaggactataatatatatctatttattatatgtctttcggttaattcctgatgtgaggagcgctgtttttcactcccaagcgaaagtcaccagcgggtagggcctgattgctacttttcatgcatagttttagacacaagagggcattgtgacgtcgcgcctggcggcgcccagtcgcagtccgagtcccgtggccccacgtgggagcctcgcactcccattggccaacgctaggcgaagccgccacattattttgttacttttcagtccctatttggaactgctctcgcggcagttcagacctcgtgctcggcccccttcgcctgtctgtgtgtggtatccgcaggtccgaggcacttttttttttttttgagtgcgtgtacgtgtgtgtgttgagtgcgtgtgcttgtgtgttttgggggtttgtcggggcgcggagaggagagccaggctgggaggaaggaaagaagccgcagagctcccgggctcgggctacgtctccccctccggtgctctccagcctgcgcgctcctaggcggcaggacgcagaccgctcctcgccagagacgcggccgatccacttgaaagcagaggaccccttcgccgaggcttcctatgccggctggagttaggatgccacggctcattatttgcaccgactgagcccggagttcctcctcgaccctgggaagggctggcggcggcggcaggagcagacggaacagcaggctctcctctccgaggggggtgggggggcgtcgaagcgtcctcgctgggctctagccctcacccacggtcctcaagccgtcacctcggtggcctgcttcctttctcttctcgccgcgagctccgggcccgaccgcctctgggatctgacccgcgcgccccggnnnnnnnnnnnnnnnnnnnnnnnnnnnnnnnnnnnnnnnnnnnnnnnnnnnnnnnnnnnnnnnnnnnnnnnnnnnnnnnnnnnnnnnnnnnnnnnnnnnnnnnnnnnnnnnnnnnnnnnnnnnnnnnnnnnnnnnnnnnnnnnnnnnnnnnnnnnnnnnnnnnnnnnnnnnnnnnnnnnnnnnnnnnnnnnnnnnnnnnnnnnnnnnnnnnnnnnnnnnnnnnnnnnnnnnnnnnnnnnnnnnnnnnnnnnnnnnnnnnnnnnnnnnnnnnnnnnnnnnnnnnnnnnnnnnnnnnnnnnnnnnnnnnnnnnnnnnnnnnnnnnnnnnnnnnnnnnnnnnnnnnnnnnnnnnnnnnnnnnnnnnnnnnnnnnnnnnnnnnnnnnnnnnnnnnnnnnnnnnnnnnnnnnnnnnnnnnnnnnnnnnnnnnnnnnnnnnnnnnnnnnnnnnnnnnnnnnnnnnnnnnnnnnnnnnnnnnnnnnnnnnnnntccctgccatgtatccgcaaggcagacatccggtgagtaattgcaactaggcttatttaagcatctatcatggcagggtaaacgaggcagtttatctagcacctccattttgcttgttgctacctttatggtgcgcgcgcgtgtgtgcgctcacacaaaggggctgggtgggtgggggcgccgtagagagccaagggtaattgcgctcgagtggcccgggcggcctgcgttggagggggacgctggcttccgccccggcccctctcctaagtcttccaactcgcgctctcggcacttggccgccagagcccttttggctttgggggtggtcgggatgcccgcttccgggccccgtcgggagagcgttgaaaaacttgctgggaaggttctgggctgtggggtggtggccttgccggaggctcccggcggggagggggccagggacccagaggaggcacggggccgcgtggagcccttctgatgtgcccactcctctcccctatgttgtccttgtgggctccaggcaccccatcaacccgggcagccgggatttaaattcactgtggccgagtcctgtgacaggatcaaagacgaattccagttcctgcaagctcagtatcacaggtaaggcgggtggggggtggccccgggctggcgaggagggcggccttgcgcgctcctgctaccccccccccgcggggccgagggggacgtcgacccccggctgcggggcggctgggcctccgccttttgtttcccctcaccgagcgcgcagccttaaccctttgcgttctgcgatctcccagctcctaaagcccgccctgtcgagggtcggggtcttgcgccttcgtccgggcccgcccccgcgtggccgagacgagtcccctcgctagatcaagggaagtttggagttggtactgctaggctccgggtggtgggcagccaccctcactgcccggaggatgctagagaatgggttactcagggtgccgggcaagtgaagtggtcctcctaggccctagggtccaggtctcgaaggaggcggtgtaagcgccaggcctgagagtctcttcctgccctcacagcctcaaagtggagtatgacaagctggctaacgagaagacggagatgcagcgccattatgtgatggtgagaggcagcccgcagcagggcggagggagggagggcagggcagggcagggcacccaggctttgggacagtcgcagacccgagctaggcccagcttcaggacagccccctggagggctcccttcttcagcttcctcttccctgccacttggaggccgaaagagaaacacattcctggccacctttgtaaagagcatttcagttgtgttttgaaggtttcccagagggctggttgccttaaactggttagaaacataagagtcaaatgagccggtgtcagggttgtataaaaatccctcttggagccctcctgggagtgtttggaaacttttgtttggcagaggggatctaggcagaatgggacaggagtgcctacctttcttccccagagtttttccagattggaggagcctttttaannnnnnnnnnnnnnnnnnnngagccttttaaagccctctgcctcccgtgtcccctcctcaagtatttcctcagttgggactctggtcctccccccccccccccccagctagatatcttttaaccttgagttcaagttgacatctttcgtttgggagtgggtatgggagccacttaagggcaggccagcagcaggctttccacataagagaccttccacccagtgctaaccaactcccagaggacaagaggagacgggtatacagcgttccctgtagagcctgcaccttgtataaacagcacatatggtacagggggtgcctgtgggagggggcacatatatttttgtgtatagtattctgagtggagaggaatgcttagccacttcccctatcagcgttgacacctttgtgggtgggtggactttagtggctttggacccagtgaatggttttgttaaagccttgtgagggggaggggtaaaatgagaagtgtcctggggttgcctgttaatgaccctttttctttttttttcctttttctttttttttttaattttgtagtactatgagatgtcctatggcttgaatattgaaatgcacaagcaggtaagtactttccttttttatataaataatatatatttaaattgtaagatgtgtgatttctttggaggtctatcctcccatttgaaagtgagcctggttcttttttgtattcccacttggtcttgaaggataaatgttcagtgagtggtctgaatgaaggcctggtgcctgtctgggctctgctgggttatattgggcttttagcatttgtgaacttaggcctggtctgggatctgggtggataaagacccaaagacctaagggaaagttgtccagttgtctcccaggagctgtgtgacacccggaggtagagagttggctgtctgcttctatctgttttaatgtaaaattttcaaaaaggaaacataggcagagttccttgcccctcttctttcttttccttgcagagagagacagagagagagagaggtactgccttgataagattacacttcaagggcctttaaaagccaggctgagctgttgaaatgtaagggaatgaagccactaacggcctagaaaacttaaagccagagtgaaatgcaatcctgtgccttgcgtttaggaggagtttctcaactctctttatttgaaggcagctgtgtcccatttcacaggaggaagctgaagcccagaggtgaagtaacttgcccaggggccagcctcaccaggccttttgagccggctggcagttgagctcagctttgtaatcctgaagtcaaaccagtttagctagtgtggtatcctttgatggatatgtaaactacctcacattgtcaccctctaataacagtatacctcaaacccagcaaatacaaacactctttatctcgagcatatcagtagctagtcctgagctaggccaggctgtgggagaggcctgtttgtctatttgtgttccaaggagaggctgcctataatttggcttggcggacgattagcttcgacttggcacgtataaatggcgcaggccggttgttctttttaacaattggtgttcttgaaatctcagaaggctgttgactcattctagcctttggtgaccgtgacttgaatggattttctgctctaaattaacagtcatttacaaggtttaaattttgctctttaaagggggcagggcccagggcaggtgagaagggcaggtgaccctgagggggaagtgtgcagattcctgtccagcaccagtggcttcttttgaatctagtttcttttcccttcctgtagggagccccgccattgggtgaagggtagccagagaggggccagcatttagtgagtgatgtgggaagccggctgtggtttcctgaggaattggttccctaggcgtgcacacatggaggctaccacatttggagttcttggcccacagaaataataaacaaacactgctttatatgtgaagaaggttctggggaagataggcagaaatggcttctgccttctaggtagaattggtccagggtcttgggtgttttaaggactttggggggggtatttattcacagtgcaaggtacttccacttcctccctttctccagtcctctccctccttggtgaatagtatcttgggcgtgttttaaagagggtaattgcacccaggttcaaaatttatagcagtagttgttgttataagagcttctaattaaggtgtaatatgtccttgcatgtcgagggctgcatgggtggtgttgcccgcgtctgaatacatggttgtttggcacaaagaagtcaccttggccgacagagcaaagctattctgagccccggggatgctgtgaactcagaagagctaagcatctcaatgctctcttggtggtgggacttctgtgcagagagcggctgtgttcatctgggatatctggccattcctcacataggattctcagatgagaaaatgcccgagatctggccacattgtcgttcatcctctcagccaggggtgggagagagggacccttaccctcttttttataggtggggagaccaaggtatccaggaagccctcatggcaagacctaggggcttatttcagagcctctgggttctgcagctgagctgccatgctccaggtgccttccagccccttcccggcttgaatgcaggctgagcagtctctgggttgggtgaactcaccctgtggctgtggaggaacaaagaggcagagaggtggagaaaccctgactgggaaacagggcagtacacccctgacctaatggcgtgctagccactccctaggcttgcaaggttttgtagaagaaaaccctgccactaattgtagtgtgggtctcgggtgcatttggcggatggtggttaggcctgagcaaacaagtttatcagctgacctgtttagcggttgactggtgttttatctgcacacacaatcaagtgactggagtgcttgaattattcatgcagtgtcctgccctctagacttgactgtgtgattacatctgcctggaacaaacaggctggattcttcatctttaagcgagtaggggtgggggtggggactggatgtacttttatataatagtctacagagctagcaccttgggaaaagtctgtctagtcatcctcaacctacacacacacacacacacacacacacacacacacacacacacacgcacttcaccaccaccacatatttttttcaaaagctcttcttcactggctccatgggaaataccaattagctgagaacctttcgttctgccagatggtccctggtattgacagagggcagctgatgaggtacgtccagcccgtttttattttactgagaggttaaactcactgtggctggctctgtccctggctgtgcccccccccccaatctctcttccaagctgtcaaatctcagagaagtaataaatgggtcctcctactcttctgcctccctccctaattatggtaaagcaaagattacagaatcacaggcctggcctgtgacttgaagaggtcaccacctcccccaggctcctgcttccaggcagagtgtcaaggatgattcagcgagggccaggaggcgatgatggctgaccgaccggcccatcagttcccgtcttgttcccgtagtgcctttccagtgtcagcagcagatgacaaagccagcttagaaacagactccagagcaactgtcatgcagtggctttgaggcgtggtgctgggggaagccagccgggaggctggcctttcaccctctgttggtgagcactgatgtttggcaagctgacttgaggcattttgatttgggggcagcatcatgccaatactagacagtcactattttcagtaacccaagcaagtcccagagccccagagctggaagagcgagcgctttggcttctcatccaaacctttgaagtcatggatgaggaagtaggctcagagagactggagctggcatccccagactgccacagtcacaggtggtgggatcgaatgctgtactgcagacttgccctccctaccccaggactcctctggagccagcccctttccgtaacttcgtagcatgctgtgtctttaattacctctgcttgtcccatgctatttattatccagccaggctcaggctgcaaacttggctccaccaaagtccaaagtaccccatttggggttgtataaccgtgtcagctgaatgctctgtgtccacagacctgtccccatttgccagctatttgcacaactaatgattgtgtgtttggtaataagacagagggcaggttcacagatgaggcgaaggtggtaataaataaataaataaataaataaatccctcaccgttttaccctgaccacaaggtggccatcggcacagggctgaggactgaaggccgaccataggcaacagttttctggaaagaccatgccaaagagttgacaggctttggtggcagtaggatggggatgcaggccctggtactaggggcagtgcctgtttgtgtggcatctgggttgagcggtgagattgacttctttgccgggagctccttcattcccccacaccgtgggttctttgactttagctgccttgttgctctaccttggaattgtgggggttgtgtgatctccccagcagggcaccatctttgctgtaccttgggaattactgagcctgaagctctttttaactttgtcccatccagctagagggtgacctaaccctctcatctcaggcttcagtggatcccttgtctgtggtagacgatagaagtgtacagagcaaagctttctgtactcctcccgagtcttttccttcttgtacacctgaccattgagatgaccttaggactagatgaagatagagaagcctgctgggaagccctactcccaattctactattccatgcgctcttctgagcagggttgtgtggttaccggggctccttttctccctgctctttagaattctccctccacccaggaagaatctcatttacttagggactcctttactttttggtcctcaatgccacattgttgaaggggattgttgaagggggagagagttggccaagaaatataaaacattttccatataggaaaatgtttttctgcatcactgtataaaatccaggaacaccaggagccaggaggagataaacagctctccgcagggctcgcccgtgatctggcctcgtggatctgagatgaaccacttcatctcagagcagtggaggatgcccctttgccaagcacacagtgtgtaataggtgctcagtaaacacgtgagggtttccttctttgggttgtgggcgggtgggtggccctacactgcacagagccctgggaaggaagtggggggttgtcattgtgggctgcctgctggtctgcagcctctctctgtggctgagcatacagtctcctcatcagcaaaatgagagagttggatccattcccaaaacggttattaggggtctgggatgtgctgggtgtgggcccgggcttggttacccagccgaataagacaccattccctccactggggcatcaggcctctaaataagtaattgcgatgcggtgaggtaagcgctaatgtggccgcagcgacacttgcttcactcttcctgggaaagcagagacgggtcagagaggatgtccctggaggaggactgttacttgagtggggccttgcagggagggtgggaggggagttgttaaaggcagacgccagcagccagagctcctcccaggtgacaacagctcctgggacggcagtgaagtacatttaggaagccacagtcaggaagagtggattgggggagggcaggggccgcacttgagaactgagaaggtggtgatattgtacagcacagcattatccgaaggcctctccaccctcacagtcacgactcggtggctccctctgtccccatatggctctccagggctggctccagtccatctggcaggggnnnnnnnnnnnnnnnnnnnnccccaagtggcattgtctcctttctcatactggtaattctgtaatgactgggtatgacctgcccctcccccatatttaattctcatcagcccggctctccactttgctattaatgatagcagccagcaaaatagctttcaacatgccattgacagtctggcttaagagcgcacttgaggcagtgctagacagctgaaagcacccataattgtgtaccagagtgagaactgcatgctcaagggtcttgtttttatatgcttaaagggacaatatcttgttttcaacaaatgctctctgagacacatccaagatgctttcttccttcctcttgtattcctcctcttggctctttctctctctggcctttcagaataaaggttcctccctaccccccacctccacccccaaccccaccccatggcttggggctgaaagaacttatagaagaggagtgatctactctgagagcagtggcagaaatccactaggctcgcccaaggcatcatccactcccaacccaaaggccagttggcctttccctgctgacaccagcactggagcagagacaagtgttggctggcatagagttttcaagtccttttgttggctgggcatggtgcatgtcagccagagactaggggattcgagctactgagctgtggctgagtgcagaggctgccatgataggacatggagaataggtaagccttggagctagacggagtgccaagtctccctgtctggtcagataacaggaggatcacccttctgcagagcccttgggtctaaggagcctgtctggaaaaccaggagggcggtgtatgggactggtattcttaactgaaagattgtaccacacttgaggggagccagaggaggtcgctgataactccagagattttactggacaagaggtcccctttttcttcacttcatccaccatcggtggcaaagtacatacccaagtgcctagctatgggaaggggaggagtgaggtccaagagccagagaaaccctgtctgtaaatggtcctcacttctctccatagccaaatttctcttgggggaaaaaaaatggagcctgggtcccttccctttacccacgcacgcctcgagtgacagtctgaagttctgatattgctattactacatccttgcatatgaacacacacacacacacacacacacacacacacacacaaacccaggtgatcgtgcaaatgtcagagacgagagtaacatggccgcttgagattcctgtagcacttgactgccaagcaggtgaggcatttttctccggaaatactggggcgtttgcttccagaacccgaggatcagacaccagaagagctgggtgtgggtggaggtgacctgtgtgtgcctggaggggcttgcccgtcgattcgggtgtggtggggtggaggtgtggagcccgggactgaggaacaggagtgttctgtgctgactgagccttgctgtctgcctggcagtgaggtgacaacacttcatcctgtaggagactcactcggacactgcggtctaggcttctcttcctgattgcctgctgaccaaggttatggttgtaaaagggatgatggtcagtgacctgtaccttgatttggagagtcttttctgtttgttttccttgttatctcctatcaagtcaaaggggggaagtgggggggagatgcagaagaagggggtgataaagctgaggtgtggagacaggaatgaggaagcgccagggaacacctctctgtctgggctgcttgaagcttgccttaccttggcgtttggtggtggggttcctagggcgtggcctttgtttatcttggcttgacaacctcttccaggtttgggttggttgctggtaattctgggaacgactctgaccctctttaaacttgtttatactggaagggaccatcttcccacagatggagacacaaagtcagccaggggttctttcccatcccatggtcctgtctccaggactgtgcagtccagcctgggtcaggcgggaaacccatcgtgtagccatgtgagtgaaagagagaagaggggccaaggtcactaccactgcccaagaccataaagtctttctttactccgggtttgacactgaggacattggtcagacaggcagcacacatgttgcttcaggagccagggaagaggagggcagtttagcttagaccagtgtcttggggccttaccattgtttttcctagcagagccccttcttctgctttctctcaaggaggagaccgcagcccaatttagctttgcctcagagtagaagtcctgggggccagcctggaggaattgagctcttaacagtgcttgcctctgcctgtcagtcttaggggtctcaacatgtcaccagcagctgctgctctctgctgccagggttctcctgtgtgggtttgacactaccttttatgtcatagcctaatgggggaggggtatcctgtaacctttagctttcctccaccccattctttcacttgaatctcaccccacttctcaagagaccccttctttgcagacaccttaaactcttaagtcaaaaacccagggccatacaggattagggagggtttctgacaaccctgtttttatgtgggtgagaatggaggtgtcagcagatttggagtttctcacagagaatccaggttctctagagggagagaaagaaccaggagcttggggggggtggggggatggaattctctggaaggctagagtggtgctttagagtcttaaaaatatgggtgtctgtaccttctgttcccaccagtgtgactctggacagcttcttgtcctttgtaaggttttgtgagtggtaggatgggtaatatgaccctacctgctagggtagccagagttttctaggattttcacagctgtggaagtacagcccaacgtggtcgacattagctacgtggactgctgaccaattgaaacgcgtggccctgtggtggctgaagcactgagctttagaactgatgcaaatccagttgcacgaggtcctgtgtggcccctggctttctagacattgggggtttaggaagtgcgatgggattatgggtgggagtggatgcccaggacgttagcacacagacggcctcacattgggacagataagagcctcaaaatttccaaggcctcagagagggagaagggactcaagaggagaggaaggggccgggctgcttaggttgcttaggctctgagcccatctcattgttaagtagctactcatttcagccctgcagtgtctctgattggcccagtaccttgaagcaggtgcccctgctgttggaagggtttggatgacgtgtgtggttgaaaggtggcccactggtagggtcagatcaggaccacatctgtttgacctggcctgtatcatgatcatgaaccactctgggctttggttccagtgcccacaagtctttatataaaatcttttaagaactcattttttttttaaagtgcatgcattgggtcagaatcagcctgccctggggctcttacccactggttggttgtcagcagcactgttgtggtcctgacaaatgtttgcagacattgcaaacatttgcaatgtcctgtcctccaagaaccagaattcgctagcagtgcctgaggagacctttggtataagggaagactcaggctctagacctgggagatgtggttaccttcgtcttgatctgtggagagcgatccctcgccctctctatacctcatctttggcttccgagaggtgggaggtttcctgtctgtcagagcagtcggtttgcgagtgaggagatggtgagacaagtgcctgaacttgatttccacggcctgtgaaatgtctccacgtacttgaggaaaggagacccgctgaccctctgaattttaatgtaagcaggggacgtgctccgtgcttgtgagagcaaatagaatagggctctgtttctccctactcggtccgctgtgtgctaccttggtttctcagtgagcccctgtcctcaaaatgtcaaagcagttggtttcatttgtaaccctgacctggtgaggagacccccaaaatttaatgagctgcctcagcaagggtaatgtgacttttacagcctgttgaggggcaaggggaagatttgcataacgctccaagggggggnnnnnnnnnnnnnnnnnnnnnnnnnnnnnnnnnnnnnnnnnnnnnnnnnnnnnnnnnnnnnnnnnnnnnnnnnnnnnnnnnnnnnnnnnnnnnnnnnnnnnnnnnnnnnnnnnnnnnnnnnnnnnnnnnnnnnnnnnnnnnnnnnnnnnnnnnnnnnnnnnnnnnnnnnnnnnnnnnnnnnnnnnnnnnnnnnnnnnnnnnnnnnnnnnnnnnnnnnnnnnnnnnnnnnnnnnnnnnnnnnnnnnnnnnnnnnnnnnnnnnnnnnnnnnnnnnnnnnnnnnnnnnnnnnnnnnnnnnnnnnnnnnnnnnnnnnnnnnnnnnnnnnnnnnnnnnnnnnnnnnnnnnnnnnnnnnnnnnnnnnnnnnnnnnnnnnnnnnnnnnnnnnnnnnnnnnnnnnnnnnnnnnnnnnnnnnnnnnnnnnnnnnnnnnnnnnnnnnnnnnnnncatatgattcagttccgtcttaccaagtagggtgcttccatccccctgccctctgccaccctccccccccccgaatttctaagagccctcatcgtgcagtacccctcctccacacctcgtcagtgctgcgtaaaggcccagtgggaggactgccccaggacgggtgcaggctcctgacgggggttgcagtttcttcctcctcaacccctcccactctcactttgcctggtgtgtagacttcttaacttaccagaacaaggaaggcccattgctttcaggaaagtgcctagaagggtcatgtcaccactcagaaaccccaggctctcttgctggggtggccctcgtgacttccttcctctctgccctcctctctgttcctccctctcatgggaagggcacagggcctgatgcaggaggtgtctgttgctcccaggccagctttgccgttcttgccctgtaagacagagatcttaggggtcatgcggagacacaggtgcttccctgtactcagtcttcctagcagaaaggctccagcaggctttctcggagggcgtaaatatttaatggtgttgtagttatatataatttgatcaatatgtcagtgttaagaggtcctttaaggaggcccatcctatcactaagcaatctgtgatgtaagccagcaccccctcccttccctctgcccccacaagcagcaagcatcatctcccaggctgctaaatgggtcatttatccctttcttagtcctcagcgggggtttgtagcatggagggaatggggcctgggaacaccaccctggcttttgttccttccttgttgctccctctcccctgattttctttcctttgttgatagataccacctgtcttaacccaaggagaaactgcctggccaagggcgccatcttattcagtaattgaggggctatcaatttagaattgcccaggaaataacaagggatatgtcaagtcaagattgcccagacattctggaatcttctaatacttgcttgctgggttgttatggagccctagttctgggaaggtaaaggccagagccgcttccgtctacacatagctactggccccaaactcttctctttttaattcacgatgaagcaggtttgctttagttaccccaagaactaagtaggtaaaacctgattgaaattgggggtgggaggctgtgatcccacagctgatttgatatctcacaggagtctagagaattaactggatatggagagacaggagtctgacactcctgagatcacagcggtaggctagactgagctgggttgggcgtcattggttctgtgtggctttgatgtgtacctcacactgcaggtaggcagctgtctgtcccttgtctttctcacatctatctggaaatgggtctctagactcatttgatgactgtccgtgacactgccctgatcctcacagaagaaacccttattttagagctgtaacctggaacttgggtgtgctgggcaggcagacatgctgctgctagtttaggtgaaggaatgtttctctgtgcactgagagatctgtacatacagtaggtactttgagatacatcgttactgcttgtatcagctgatgtcctgttgctgccacaaaacacctggccaaagcaacttagggggggggggatggggatgttttcatttggtaagatgcctgcactgccaacatgaggacctgaatttggattctagtctgctgaaatgcatctggactcttgttagcagagatggacagaggcaggctgaccaaccgcctgctgttcactggccagccagcccagccaaattgatgaggtcagagttcagtgagagaccctgtctcaaaagaaggtgtgaatgatcaaggaaagacacctctgagttgacctctggcctacatgtgcacacggcacatggacacaagcctacacacaaaacctgcatatcccatacacactttacataaagcaagttaagaaaggagagcactttctacttttcatgtgtaggttagggcccagctcgtgggatagcatgtctacatatagggtaactcagtctttctaccacctcagccccacccagagagtcttactggcatgccctgaggtttgtctcctgtcaggttgataattctggccaccatgtttctcttgcctgaggctctaggacagttgtatgcagtctaggtattgggcagattgaatggctcgtggaaagattggacttcaggacccagcccctagggagcaccacaggcttgcccactgtcccatcgctcatccagctgtcagggtgtgtcttggtacccatgtaggcatgtctgtggttctctgttttgcagagctgggtgaggaagtggggaattggaggtcacatagcaagtcaggctgttcagacgtgtgtggccgtctaaagtctgaatttggcccctgagaccaaaatgagctgcccggtgtgccccttcccttttccagggaatgggaaagaaagcctggagatgagaagtgtcttgcttaaactcggcggagacatctgggagaaggagctggctcatttcttctgtctttagagcttcgagtgctctttaacggggctggtttcttccccgcctcccttttggtcttgctgaggttaaaatgaaatgcgctctctcatcgtccccaggcacaggcgaccaggcagtttaaagctaactagcggtgagatggtctagtggagtgactgtcagagacactgtgtactgtgtcaagcatggtcagctaaaggaggcagataggccaaagactgactgggtgatgaagggcctgcagcagccactggttgctgggggtgagggctaaggcttgccgccatcctctcccttaacctcagggtcagggatagtctgaagctggagcagatcgctcgtacaggcagatgcgccatttcagggcattcacaaaccctcagcctttggcctgatgttgggagatcttgctttaatgaggagagggacgtgggaccggagctctgacaacacagggaacagagtgctctttgggaaatgtgtcccccccccccattttgtcttctgtcatttatttgcctaacaatctcagcagacgttcctcccaacacccagttggtatcacagatactgaatgtgtcaggactccggcccttcccagaaatcagtagcctggaacagcagtgtctttctaccagcaacactgccacccttgaactgtacttaaaaagcactttgaaaggccaaagcagcctccccagacacctttccccaggatgttcaaaggaagccatcctcccctcccaccacctctcaggtagacctgaaggccagggttacctgcagagaactgctccttgtgtcctcaggaggcggggaggatgggagccaggcttgcttaaccctggctgccacactggcaatgcatcgtgcctgagcgcctggagtttcctagtgcacgcattagctctagtgtggtgtgtgacctgtcttaattgttgaaatcacgcatctagattcttgtccccccccctccccccctccctttcttttttggagcgggtgctgagaggttgtttgagttggatcaaatgctgtttggacagctgttgcaatcagaaatgctgtcaatcattagcctcgacggtcgattttctttcaaaatcatttctctgagccgtctcaacctactgaagtttggcttcctggccggaagttatttagtggagtcgcttaatgggtgggtgtcagtttccctgtgtggaagatagactgttcgtaggcgccttcctgcaggctgtgagggctaacacacagagcgctggtggcagcgggcaaggtggatgtttctctgttactctttaaaagcctttatgtctgggtagctggttccccttcctcatgtaacacagtggttctcaaccttcctaacgctactgccctttaatacagttcctcatattgtggtgagccccaaccataaacttattttcattgctactttataactggaatttattactgttaagaattgtaatataagccaggctgtggtggctcatgcctttaaccccagaaaccctgctcgagaggcagaggcaggcagatctctgtgagttcaaggacagccagggctatatagagaaaccctgtcttgacaacagaaaaaccaaaaccaaccaaacaaacataatgaaaatacctgctatgttcccccaaaggggtagcaacctacagagtgagaaccactgctctaatacaacccccaagagattgtctggtaagtaattttcccattcatctctggactcagtggagtacacagcagcctgtgcacaaagatgggaacggctcagtccgtgctgtgtagacaggagagtaagagagatgtagttacaactcctgccaggagggagggcaggtaacagaaacaaaggccagcccaagcaagccccgagacagtgaagtccgctggttatagaagttctccagatgtagtgtgcaatcccccgcctcccaagtgcccttggtgacctgtcagaatcctttctgccaggcaggcctctctgtcatgcttgagcccagatgtcattaccatggacttctagaatgttcttcctgggagttgttctgacagttcctgtgctcagtagctctttgtggtgctggaaggtggattaagtagggagtgacggcttctccgaggtaccaggccttgacccgaacatggctacaaaatcaaagagaatcccttttcttagtgatagaggatgctgggctccggtaaggtgggagaagtttcctgtaggaaaccagtagtcacaagcttcctataggtcggtgaagtagaacacagtgccttttaattttctctaaccaccaagaccctgaccctcggcctgattagtagaggatgtaggctctgtctgaaacccttgagagctgtagtaggtcaactggctggcagggatcagagtctgccttctccttcctggctgtatgtgtggggaattgatagggcaaggagagatccagtgagctggcttgtgcttgccctgccttggcatagacattcaccctgtttaaagggcctaagccattgtccatccccacctcccttccagctgactgtcaacactttcccagcacagccctttccacagatgttatccacatagggaatcgtggccatacgtactgcaacatggagtctacatatacatgcacacaaacacagtggcgccgaggagatggctcagtcactaacacccttgctgtgtaagcatggggacctgagtctagaattccagtgcctatgcaaaagcccggcgtgtccatgggaacctacgacccaggactggggctcgcagagtcaggaggatcctaggagctcattggcttctcagtctagctgaaccagtgagctccagatttactagcagactctctctgtaaataagatggaaggtaaaagaggaaggcaccagatgtcagcctctggtctccacgtacacatgcacatatatgtgcgcacaggcagcatacgggcaccacacaggcaagagaaagaatgaatactagcagtgttattctttggctagatatttattgagcacgtagtgttttccagtcattgctactctgattgtttgaggcaagagaagcctgggccaggggtgcttcctcagcacctgggctgatgatccagccttggtgttttgccctttataggtcctgttcttagccatgcgttctctgccagttcctagtgagatgcaggcaggctcggtgatttcagagatctggtggagtacagctctcatccctgtgttccctcttctttattcattgtttgaacaagtgagaggggtccttgttttggggggtacacttacttcttcctgtttacctaggctaacttagactatacaaagtgatcctctaagagcccttacttagagcaagaatggccgacatccctgaaaaaggccagagtctctgtggttaagagtcttgcaatatatagaacagcccagcggaacaaacaatttgtgaccagtgaggttgagaaaccttggtgtgtgtcatctttgttgttgtctgccaccattgtgcaaatgtgggccccaccagctcttagctggaatgttacctgccctactctcagagagctttgagattggagaccatgctgatgcagatggtctggagtctgaggagcagtccctcacagtaaagaattgttttgctacgaaagcctggagaggtgcctgctgggtaacactgggcctgtttctgaggagacccagctgttccctcatggccctgacctacccaagaatttaccctgtactgggcaggtactctgggttgcatcatttggccccacaggatacagggctgcttaagcccatcaggctcccgtcagggcctgttctctccataaaaccagagacattctctttaatgcccagtggcctccagactcttacactggccccaggaattccccaaggccagagtgtgctggtgagacttcagagggcattgtttttatctgaggcacactagatttcgcatgcagagtcatctgacatgcagatgatcacaggtttttaaaaggctgttgtcatggttttgtcagaaagattgcctagctgatgaaagctttgaaggctgctctgagaccttcgtcctggctgctcagggttcagacaagataagaaagccaattccaagagttgtctgtctgcgtcccagtctttcctgctgggctcagttaaccatttagcagcactcttgatctgtgatctgagtcacgcgtggtcccactggaaattcttggtattttaaacatgggctttactgggaagctggggcgggcagagaagccgtctgatgctttgtgaccgcttgtatgaggatgcaggaaggggctggagagatggctcagtggttaaaagggtgtaggaaacctttgggttccattcttagactagaccctaaggatcgaacactcaccatactgcaggggttagaagcaaccgtcaaagtagaggacgagggccacatgccactgcatatgaggctggccctgggagagcccttccttcttggtgccctgggctctcttgcctttgacctctagtttggagcattagtgggcagcgcagttctctcagcactggatttgtttgtcacgggttttctggactgtggagaggtctttgttttgatatagtagggattctttctagaggatgcgagccattgacccgagtcccctgtgaaatgggagctttctaacacatggtcactggagcccatgtgtaaggggctgcagtgtgtgtgtgtgtgtgtgtgtgtgtgtgtgtgtgtgtgtgtgtgagagagagagagagagagagagagagagagagagagagagagagagaatgtctgtctttctgtctgtctcagtgtttcagtgacttgacttgtggtctcttttcctttgcagacagagattgcgaagagactgaacacaatcctagcccagatcatgccttttttgtcacaggaggtaaggccttcgtctctttcctcttctgcctagggcagcccagtgtggctgtttcctggggcccaagccccgccctagctactgtactgatctagccggtaggattcacaggccttctctgctgacctgggggcagggatctcatcaccgggaccacatgctccttttccagtaggagaatggttctctgccacacctgaggagggaggctgagccctgtgaccagtgtccttcatacacttcaccacgggcctcagctttccagggtacactcctatacctagttcaagtaaggctggttggttggtgccaaaggtcagaccctgtgtggggtgctgttccccaggtgctaagtgccctcgaaagtctcgtcactttctaagtaccccttgggagacagcccccttaccctccaagtggaggcaagggctggactcaggagcgttttgaggaaggtatctccaaagaggtgccagaggcgatgtgcagacctctggcccccatttctatcctgtctgatctcactccagcagggccagggcctaccctacatttatcccctaaggtggctcggatcatatcagctccctgctggagttctggatctgagatagcaacccaggactgactaaatacatctgagaattagatatggctcatgctatttgttagcttctgggagtgtataaaacttaacttttaataacagactttagtttttcaagggcaattttaggttcgttaggcaagcttgagtggaaagtacaaagtttccccatggcctctccacaccgggctggagtgactgttaaccaacgctcattgtgttcgaagactgaggctgtgttaggatttctttggtcgctctcactttctagttagacacttagctctctcttctggtagccatagatgcatgtttctgctcagccctttaaatctaaagcccacatgttctgtttaattcaccctagccaccatagcttcctgtcctgaaacatggtgtctgtcctatgtgattaccataatgcccagaaaagaaccactccagtatgtaatgcccgactaggttcttagtgcacagagctaaggttttcctgaatgtggagttgaggaggtcacgggccagtcttgggaactcatctctgccttccttagaaagtagtacttgctcgtttaaagactgatagagagtgtggcatcactaaacacccacatccctaagtcctgggcctgttgagcaggcctnnnnnnnnnnnnnnnnnnnngaagggtcctgagagactcctggtgccccgtgatggacagtattgaggaccttgatcatgcttcatttcccaacagcatcagcagcaagtggcgcaggctgtggaacgcgccaagcaggtcaccatgacggagttgaacgccatcatcggggtacgtggactccccaatctgcctctcaccgtgtgtatagcccttttattcctctcatttaccatgaccagagatgaactctgaccttaggcgctctcaaagaatggcagccccggggcccatggcatccctaggcaaccgagggcttagattcaccacattgtctcctggtcccaaactaaagaaatactagacacaccttgagtccacctgtaactttattagcttccatatccccagcataaggtactgaccagttcctggctggtgccccctctcctccctttcccactctggctgcccttctttggcctcctggggtcagaaccatctctgctgtttattgatgtgcaccgtgctgtacagttttggggttggggtcttgctgttccatgtgctgggctgcatggctgagcacccacacacatccttcagagtttcagctgtgtacctggatggaaccttctagaagccccacctcatcccccaacaagggagtactcatcctgcagtgctctgtagggccctcagtgaagagaaaggagagggtgggggcagttcatctttctaagccttccggctgtgggcgtggcctccggattgtcctcagagtgtgtggtcactgagttcttcagtaaaggcagttcagagggttccttctagtgttagtatctgtgggagctcctggagactggagggcttaagcctccattgattcttggtgttgagggtagagtaaacccagcctgtgtgggggaagggcaagaagcttggtgctgggaggcagcactctggggagagaaaccctgatattctaaagcttgaagtatctccggtgatcatccagctcagggttctctttaggaaatattttttttaatttgctttctgaaaattttgtcatacatacagtgtagtttgatcctatccacccctacacccactacccccttctgaaagagtattgttttacatttcttttattgaacttatgtgtggtcatatgtgttacagagcacatgtatgtgctggaaaaggatgatacatatgagccgttctctcctcccaccacgccggaccccataatcaaactcaaaatgtcaagcttggcgggaagtattttcacgttctgacccacctcagtgccctccccgccccattgtccacttttattctctgcttcttctgggtcccttcttcccccaagtctccctttcactgagtttatttagggtttcttgagaacaggggtgggacatgtgtgggacatttattggaacaaagagcctgacactgttgaaacttgggggtcagataattctttgttgccgtgtacagttttgtatattcagcagcagcaatcttgctctgtacctactgggtgtgaaagcaccctcccccatacacacacacacacacacacacacacacacaatctgtgcactccaaatgtctccagatgttgcctgtatctgcatgggcacagggctctccggttgagtaccactggtttagtctgataccagtatttcacagagattagcagtcaggccggcctgagagcatccctgagcatagccggtgtcctacagtggcggtgtagggagttagaagggggcctgagccccaggttgtcttcagaagtctttctcatctgcttcttgtcttcagggcaagttcttccaccaagctgcaggggctacagcctggtcccacctcttactctttggaattaaaatccacatgtgaaaatactttttttctttttctttttgaaggaaaaagtaaaatcgggcagcagcgcagctggattggctccagctcctttaagtagcgtttaggaagctacaagttaggtcaaggcggccctaggcagatattggaattcaattaaagcccacgagtggggcctgtgacccccattttcaaggtaattgcttctcaggctctgagtgaatgcggccgtcgccctgtcattaggcaggcagccgtctaatcgctgcgcgcctgacagagcctcacaaggcaggaattgctgacagctggggcacccagactggggagctgtgcttgactgccctccagcgaggggccttgttccttttcttctggaggcgagaggggagccaccctgctgagataagggcacaggcaggggcagtgctccagtcttgattttctcagatagaaaggtttctagtggcacatctgctccagttggctgatcgtggcctcctgacacagggctggagtctggggtctccatttagctgggctgctagcaatatgaggagtgtggatgtaaccagaagcatgtcacggggttgaaatattgtgggagaacagaaggataggtgaaaggacctgggctgctggccatccctgtcccctagttcccagtttgtccttagggaactcatgtccctttgggtaagataggcctagagatggtgttcctttttagaacttagctttgtacatacaggattgtgtggtggcctgggaggtggtggactcttggctccttggtctgggttgcctggagaattatttagtgggtggtatgtgcagtgttgacttggtggttttcttaagaggggagaagagacgggaggagggaggttggagttggaatttgtcccagactgtgcagagatctgtgaagcgctctcagggcttcctgtcttctgccgggtgatggctgagcaggatggctggctggacaggagttgggcggtagaattttagaagggatagaagggtggatggctctgccttagtgcctgtttccttagaaactgaggggaagtaggggattgctgagttgggatcctggcttaggtttctgttgtttggtgtagttacttggcccctggggctgtcccatctctgaagtagggatagcaaagatcatggtgacctctaaaaactgctgccaaacccagaggccaatgctgcaaagggagccttgggtatacctactgggctgtgtggaagactgggaggtcgagttacctgacttcccaggaccctgtctactccctctcatgcagctagctgttggcctgtttgactctagaattgaagcagttagacaactcccctaagtttgacccaaattacgaacctaagaaccgaagcatctaatcagccagcagaggcatgaagcatgaggtgtgtaatcccgttacacacgctcctccagcaagctctcccatcagcctctgctgtgggccattcctgccagtaccagaccgtgcgcactgggcactcagggatggagggcccaggaaaccccacggggccatgatgtgtttgtgtttggttatgaaatggccaaggatggagagatgatgttcaggagtgtgctcggttgtgggtttctcagccctgcccgctgcgggttaaggccaagagggagaatcactgaacttcccttcttctcatacatggagaagagccagtgttaggagggacagtaaaaggtggaggcaggtggcctcggactgtggtattgtgacatttctctgccattgagaaagctttccagttgagagcagtgtggccctcccactcagactaaacggtttgggtaccttgctctctgaagccaccagaggacagaaacacggcccgagtgtgactgcatcccgcttgcctgctgaaggaggtgacacaggccatgctccttcctacctacctgtgaatcacttcattgccagctgctcctggccccatcagggagagcatttggcttcgctccgaattgctgccaagaccatcgctggcagaacctccatccagaggggcagtggcatccagatgcatccgttcttaccttttgaagaatttacagcttaggtcttccatcagtctgtctgcagtcttccgggctggcccccgtggtaccctcagaccaccccaaggagacgaaggcagtgagtgttttctggcagtgcagagccaggtgctttgcttgaagatgagaaacgtccattttgcatggaagcttccttgcctcttgcagaggatacagaccctgaggagcactgtgatagtgttggaaactagtcatgttgtgtcgctgccgcccccgcccttgtcacaagtttctgctgtggatttactagtggatatttggggaaaacaggacacttatctacaccattgaccctgctgctccaactgcctctaactaactgggcctccagggctgtgttgccacctttggatcaagctctctgctcctcgtttttccacttacctgctgctaaccttctccagcgtttcacttactcactaagtgtgggtacagggatgagcccggacttgttggaggccctggatgggtaacgcaatggctctgtcttactgcaactcagcagttgctcaacgacaatggcgatgatgatgcccatttgccgaggaggcttgcactcggactttgcttttacatggaataatgtgagttctgcacagcccaagggtgagcctcattttgatatccagttttgcagataaggatacgggcccagagaggtcgggtgacttgtccagagtctcagcgctgataaaggagaagctgaaagtcctcatctccagcagctttgcctgcttccagagtctgggttcttgaaactgggaaaggaaatttccttctgaccagaagagtggaaagggaatctgtttgaactggacagagtgggcagggtgggagaggagacccacacacagtctcacatgtctgcagccaacaacaccctccacgcactcttttgtctccttaaagcatcttgacttaccagttcctctgtaccatacagtgcagattaagtacccaggtccttactttctgggcttttattaagtaattatcaccagcagacttgaaagggcttcccagcaaggagtttaaaaacaacagggcccagtggagattctttgtaacataatgtctagataaagctgtggggtccagccatgccatggaatactaaatactcattcaaaagagaagtgtttttcccccttcagaacaccttttaaaccgggtcatataacaacagtgtggacaacaagagctcatttgtagaaaactgcatggaaaaactgtagatctgaaaatctagattctagatggcctgacagccggcggcgtcctgcgaggtggaatgaatgggggaacttaaaaagaacaaaatttaaaactttaaaaaaaaatattcttacagtgagcctgtgttatttttgtaataggatgttaaaaattcatttttaaaaaagggaaagtgggggagctgtgtttatctcccatcggagaggaatccaatcttagctgagaggactggaggtcccgtggttctgctctgaaaggtcccttagcttaggtgtgctgtgacacagggagaaccacagtcacatcgctaagatctgtggccaccaaaagcttgcacaggtgcctagaaggagggcttggggtgtcatttcaggtcctctgtggtccagggcaatggccgtgggtgccaactttacagatagagctaagagacggagcctcgggagccagaggtgtaagactgccagaagagccttaacttggagggagagctagctaggtcagcagtctgcagctccgttcattgaggggaatgtgggcagctttttcatccttggccagatctctgtaggcattccccaggtgccgttgaccttgagagctgcttgctctttcacagtgatgggcacgagctccgtcagcctatggctatcctttcttggcttattacatctttgcactcaccttttccctcttgctttgagcattctgtagatgatgctagtggttgacagataagagtccagatcccatttagagtaatggagcttgggctgcccattccagtgcctctctatcagttggctgtctgtaaaatgggcacactcactgttgcctgtcagagttacgggttttatttggatagtatccaggagtttatatgcacatacaggtggtattggtccctttctcttgggggctagtctggaagaaaactgtgtgcacaaatggggacaagcatacccagtgccccagccagtcccaagaaatacttccatccctgagaaatagttgataccatatagcctgccctacaatgccagtggttgttggcaatcttatgaataacagggcattctgtcttggctgctggggaagcatggaggcctctgagctaggaactcgggcacgggagcagaatctggtggggagccttgacgttagcaatgggaagaggtgccaggcagcaggttcctgggttggtttggggaggaatagaaggatggatgttgctctgtgcctgggagtactgaggtcgttagaacagtgggagatccctgtgagagccctgtagaaatgccagtgactgccacgaagcccattgagcggtggctgtgtgcccaagcccacataccttactgtagtcacctgccgtgggtgctgcctctccccttatgcagataaggaaatttatggcttagagggtttggaagtccctgtcccaggcatacagaatcagactagaatcctgctctgtctggtttcggaggttcagctcttcccagctctgtgttctctctactctgagggccaagggcatcagcgttgattccaccagtcctgggacttctctgctctggcctgccctgtcccgactctacaagccaggcttcgttctgcttctttagaagcccagtcagggaggctttccccaggttccagctttgggtgggaggctctggctgctgatgttaaaggcatgtacgcatgagctatgagcttaaaaatggattcctctctattgaaaggaagccctagtgaccgtgtgggttttaaatgcatgcattatttatcttgggattggaaacaggcatgggaaactctgtcctgttgctggggtgggggtggggatgatgtttgaagacatcagtccaccacgctgcagtccattaacagattttgttgagcaagatgagcatgtggtcgagggggaaggttggaggggggtgttttccctgtctgtcgcttcctgatggaggagcgaggggaggggcagaggtgacctaccctctgcccttcccggcctgtcttggcttaccaccaacttcattacagcagcagcaactccaggcccagcacctctcccatgccacgcatggtcccccggtccagctgccaccccacccgtcaggcctccagcctcctgggattcccccagtgacaggaagcagctctgggttgctggcacttggtgccctgggaagtcaagctcacttggcggtgaaggatgagaagaaccaccatgaactggatcacagaggtgtggctctggctgggctgggctgggctgggctgggtgggctggagctggagggcacactgtaaatggatgcgacaagtactgtcacctgaagcctggtgttagctaagacttggagccgtctgttgagtccagtgcatggacatgctgcagttcctgatgtagaccccggtgacagtctgtttatctacagtagccccccatattcccaataacaccctgcctagtttttagggccagccctgcatgcccttcagggtgctttcgtgattgcactgggtgcctttcttaaaagagcttgagttggggcctcgttgtagccttctgttgctatctttctggatctctgagtctcctcactgggaaaccttccaagaggcagcactgctgggggtgttgctcagttggtaagaatatttgccaagcatgcccgaaccctgagttcatcccttggcaccatataaaacaggggtggtagtgcctgccggtaagtccagcactgggagatagaggcagaaagggagaaagttcatggtaattctcatctgtgtagtgagttcaaggctggcccagggtatttgagaccctgactcagactagtggaccatctgtaagtgtagggtctcaggaatacgccaacagagaagtaactagagagacgaggaatgggaactcttgccccagccccctgaatagcaccactggggctcaggaggatatcagagggaacaaggacctggcctcatgcagcctctttgtaacgctgccagcttgtacttttggttggcttttaggtatttactgggccacatagtcaatatcttccaagctcccaggggctttcggggaggagtcgccatccaagccttagtccgtgctgtatcctaggagccagtggccaactgttttgttccttcttgacagaggggagaggacaatgagagctgctgattagctggactggtgtgaccagaggcctatgcttctgggggctttttggcaaaggaacagagaatggtgttaagaaagcaaaccagtagaagtcagttccaaattgcaatttttaaaaaaaaaaaaaaaagcaataaccttcccagctctcatgtacgattctagaaagtacggcgaaaagcaaaccaagattcttttgacacaccaggaagaaggctaatggcctggattctaggccatgctgggcactggtgggagggggcaccattaagatgccatatacggggcgtgccttcactgcactcagggaagtagagtcaggctaaccagtgagaggtggctttgataaaccacaaaggtcaactgtgatttattaaagtgaccttgttttttttcccttgtttttccttgtgggtcctgaccctcctcctttcctggccttcctgcctctcagagagagagtccagcacggtaagtgaaggtgcttttggtgtagggatggggtgcgggaggaagatgggcctgcctagaggcctgttcctagaattacaggcctggcaagtagcctgtgctacccacagctaaccccagtttcccgttctgctctgtgggtggaagctggggtttttatttatcatttgtttatgtgtgcccacagctagaagacctggcttcaggactggtatgtgggtgacggtgtctctacccatattcagtactaggggtagttactgtctatcataatataggagttgctgtcctctgttgagtgacctttaattagggaagctgtttaactctaggcacttgcctgagtgacctccaaagccccccttacaaagagacatggtcaactgaagccattagcccaccaacctacatcttccaaggggctctttggagtcactggcctgagccctgcgttcccgatgctgcctaggttgatgatggttcatcagccccgtaggctggatgcctacttccggcataatcccgagccctcctttctccagatgcccaaggtttctccctgctctgcactttgactctgttgaaaaaagtgctagctagcaggtattaaggccaggccgcctgcgtgtctgccagctcagagatttgctgtaaatctttctgatcacaccgaggctccaaggttctgtttcaagtgaataagccctctgaataagcacactggagtctggataaaaaaaaaaaatcctccagcgattagcagagctattttattcttcatcgcagagcttgtatccgggaccatcttaatctgctaggatggctctccttattacctcatgttaagtagggcttggaatgtcaggcctttaactagccgtccaggcagcagcctcctcgggaagctctctctgcttgacccgccttcctttccaatccctccctccatccagactgttctcatacctccctcccattagctgtctcttcttgccctgcctgcctgcctgctcagaaatccaggccccgcccgcccccttgggctcaggaatggctaggcacagaagaaaggattgattaaagctcaagtccattttgattgctttggtgttgatccttaaacagtggcatacttttggagaggcagtttccctacatagaagctggactaggtatgtccacctgcgttgtctcccaaccccacccccaacctccacccctccccagcttcaatccaatctcagccttatgaggtcttgtgtcttgaccttggagcccctgtctcctcctgcatgtcatggggattaccctgccagacggcctctcagctttggataggcagaccccctgtagcagggctcattacttggttagcaggaggccttccccaggaagtgggcattgaagcccattacctacttcttcatacctattcgcttttggctttgtgcccttgctgaaagctttctgccagaaacccagagggacccccaagtgtgcagcccccccccaataatgctcctggcatccaagctaggctgactcaacatgggagctggggaatgaacagggatgaatcccatgacatcctagggctgggcagctcagggagggcaccagtgggggatggggagtactctgggggctgcatcctcagggccatggtgttggatggtggagattgaaataatcagccttaggaaaacagcttgtcaacagtcaaggcctccggcaggaaggacaaggctgtgtcagagaggggagggggccgggtggacaggctggaagctgtcccagaggggttagtctggagtccaattagaggtagcttcattcatatttccttgcctagctgaagcaataaaaaatacttagttttttggccgcctgccaaccagaggcgggctggatcgatgccgctaaatgcctgacatgactctccggtagcggcgagggttttcagcctgactgcatgagaagaaagagttccctgttctcgcactgggtcgcaaggagaaacacgagcagccaccccgtcccctccctcctctccatcacccgcctgcgcaggggcagccagcctgaggggctggaagcatttctgcttagcacggggtggccgccaccatcggaggaaatgaaatgaaatgacggtgatttttttttctgcctgtgcttgcagcaactaattgaattgcggctgtgagcgcatcgccgccgctcgcccggctgcggggaaggttgagctgcagttccattataacctccattttttttcttcaaggcttgataactctgccattttaatttgcttcaggcagaaacttggcagggaagggctgcccagaaaaccggcttaggaaaggaaattaagttctgcggctggctccctcccacaccattcccccaaacccatccacctgctggccaccccgcctcgttccttgccagtgaaccccatccctgggccagcattggcctctagtaaaatggggaaaggagacaagaagggttaccgtacctgcctttagtgtccctctttgtaagcacatcgtcttgctctggagtcccacacgactccagcatgcatctttagcctgtgtggactccagcatgcgtctttagcctgtgtggactccagcatacatctttagcatgtgtggacttgtggccactcttatccctgtagttagaccggggttctctgactcatcctatcactcctgacattaatgtcagtctgaacaagggtaggtttatcagtacttttcttatcactaggataagataactggatcgaggaaggattatttggctcatggtttgagggtgtacagtccgttatggtcacattgtgacttggaggaagcaggagtgtggggtgactggttacatcctagccacagttaggaagaagctggcctgtatcagaactcccctataatcccctgtggccctgtgtctgccagccagaatccatgtccagaaggttccaaggacaacccctccccccaatcagctgggaccccttagcctgtggagcacttcacattcaaacagtggtgcttgaggtaagccattgagttcactgagggggcgctaggccttcaaggtttgcagattagcccttgccagaggttccccctccctgtgcacagccacaggacaccctgcttccagccttccctgctgctcacctgcctcagatcttctctttctcaggcttgtcatccctagggattcccctccctccccctggagcagaggaagaactgagaaaactcccagtgctctctccccagcatgaaacctacagtcctctgctgggagaccttagcttgctctcttgggacacttgtccccaccctaagggaaaggcttagtggccttgcaggctttgtgcctttgtgacactggcttgtcttccgtttgtgggaggattggcagtggaggagcccgggctcagggttgttcatctctgcttagggctttatctgcagctcagcaccttttctcattcgctgcccaacttaaaatggaagttcttcatgtatgctcatctatggctcaggtctgacttgaaaagacacatctttccttgaagtaaatagagtgacgggtgcccctcaccctcttgggaccttgcctcaggccaggaaacagaaatagcagtaccttgcttctaaaaattgatatcttgggtaagttcccagggacccaaggtgtcctgggaacgtcgtgggtgaaccacatctgcagacacagggtatctgcccacctccgtcttctggccctctgtcatccgcttactcgaatgtaatattgcctgtgtgcagtattatacaatcagcatggaggtttgaccccagggtcctcttcttccagaacaattccgtgtcaccctctgaaagcctccgggccagtgagaagcaccggggctctgcagactacagcatggaagccaagaagcggaaggcggaagagaaagacagcctcagcagatacgtacgtaggggtcggcgaagtggcttcgccgggtagggttgtgacctccctttggcctcgactctggcagttgagttctgagtctgagaggctggtagttgtgtcagggcccagagagagggagaggtttatacatactctgtggtcaggtgagccattgggagagaaatggacaggggcattacccaagcctacatgcagtcttaggagagatgaaggtcctagacacctctctgctgcaccccatgctccaagggagtgtcctggggtactccaattgtgagccccaccgtctacacagtccaccccaggcatccagccacggagacacagtttgtaacaacctgatggcgtgaccttaacctgtgagataacagtgggatcacggttacatgtcctccattgccagactgaacaggggtgagatttgagtctagaggaggggctactgccaagccatctttgtcccatctggctgccctgtggctctgatcatgttacacagagctcagttgtgctacagagtgaagccagtcacctgccccaaagtgatggggggaaggagatgctggctttcaaaggctcaggactatcgtaatgaggctgcttagacacgtcagagccccagaggctgcactacaaagaactgggaggaaggaattccaaggctgctcatagagggcaggggacccagcagccgagaagcatgagctttggggtttggttggggaagttgttggggtgcattgttaggcttgggcagatcaggggtccacatgctcttactggcttctctcttgcttataggatagcgatggggacaagagtgacgacctggtggtggatgtctctaatgaggtaagggcaggccccagttgcaggtggggtgatttgggacagatcctctgtaataaggtctcttctgcctgctgctggagccgggcagtggtgcatcaggggaagcagggagacaagtagcttcatgtgtgggaactgaaaggaagcagcagtcttcgtgtcccatagttgtctagggtggccctatcttccctctccagggttgggggagtatgctttcctggagagaatttcccataaagccctgtgaaccttgctggttagcattctggacttgtatgtgacctgggggaggtcaccccacctgtgaggtagagggctcagggtctagattgttcagagctaatcccctcccacccgtgcccattaccttcctgttgctagggcagggatacctgctttcagcttaaaagctctgttacacttgtcctttcaggacccagcaacaccccgggtgagcccagcacactcccctcctgaaaatgggctggacaaagcccgtggtctgaagaaagatgcccccaccagcccagcctccgtggcttcctccagcagcacaccttcctccaagaccaaagaccttggtcatgtatgtgggggtctgtcctggcaccttacagagctgggggaggggagagacaggaggcatgcttgcagaggctagagctccagtcctgctgcctgcagggtgggaattgggtgtggaaagaacgtggctattaggattggctgtgctttaatcattaacccacactagtgaatgttttggagccttggtttctgcatctttaaattagaaactttaccacggtccctgccagctagagacttctgttcaacccatgcttggcttcatgtgggaccagggctaggcattttgcccaactcttgggagaaaggaatcctcatggcgtcttgtggtctctgtgtgtcttcccttctcagaatgacaaatcttccacacctgggctcaagtccaacacaccaacgccaagaaatgatgccccaactccaggcaccagcaccaccccggggctccggtcaatgccgggcaaacctccaggcatggacccgataggtataatgggtaggcacaatgggacccgggtcaatctgatgggggaggggaggttggtccctggctagatagagccaaacagatggccagcaacatagggtgtccaagctggggcttcacaggtctgcctggtgatctttcttgtcaggtttaaggatatggaagcctgcacctttgacattgatatattagggtttttgagggtctttagcattgctatgtcagagtctacgaggcctctgctgggctaagtgtgaggaaagagcatctaacaggttgttaccttagatctgtgttcactgtctgttaatggttttgtgagctcctgagcaggccctcttctttgggccgtgggctgcccttggaaaagacatgactccaatcttggcctcagaagtcaggggtccagttgggtagcttcagatcgtaagagggctatggcctcagctttgtctatcagaagggtgagcccactctcacggatgcctcctccccactcatcccacttcctcattcacatcctcacagcctcggccctgcgaacacccatcaccctcaccagctcctatccagcaccctttgccatgatgagccaccacgagatgaatggctccctcaccagcccaagcgcctatgctggcctacacaacatcccatcccagatgagcgccgccgcagccgctgcagccgccgcctatggccgatcgccaatggtgagctttggagctgtacgtagaccttttggctccttttggtgggggcggggattgggtagggagtgggagctggcagggttagtatagtacatatccccgcatgctgaggggatcctcggttgttgtcttaaggtgtctattgctgcgatgaaacaccatgaccaaaagcaagttggagaggaaaaggtttagctcactcagttccatagaacagtttatccccaaagcagtgagggcaggaactcaggcagggcaggcacttgaaggcaggagatgatgcagaggccatggaggagtgctgcttactggattgctctcatggctttgctcagcctgcttccttatggaacccaggaccatcagcccaaggatgctaccacccataataggctgagccctcctctacccatcactaattaagaaaatgccctacaattggatcttctggagacattttctcaattgaggttccctcctttctgatgactctagcttgtgtcaggttgacataaaactagccaggatatctgtggacacctgacagctgctctgggaagagcacctgtttagagagagtttccttatggggtgtcagacctgcctgtcagtctcgggtgacttaaggtaactcttagaccgccctctctcatctgagacctctggataatagcctgaaaggggataagggtcccagtaagagcttagtgacatctggtcaggtaacagggttttgggaggtgggcctggtggtgacaaacagaattaaggctggcagaggggactcatttttcaggacagtttttctctactcttctatacttggggtggccccactccacaggcttacagcacactcaggaaggagagaggtggggcagggcctactctgtctggcagtgccgaggggatacaggctgaggtggggtttaccattgccatcctgtctgttactgtcctgagaggacacttggccatcctggcatctgccttctctgacacaggctccgctcagcagtgctgtctgtcacttagttctggagaagtcacagggtgcagcaggcctagaggacagtggccatggggaacagggtgaggctatgtgatgacagattgactgagccactctcctttctttataggttggttttgaccctcaccccccaatgagggccacaggcctgccttccagtctcgcctccattcctggagggaaaccgtaagcacttggctattctttttgcatgcttcacggggtagacaggtaaaacactcctgtccatcccctgagcacagggtcttgctggatacaatgtcctctaaaaggtatctgtccctcctgagacacaaaggcatggtcaccacccaaggtaagtcagtcccagaaaccccctccatcaggggaacttagggactctgaggtccaagttgatggctctgggagggtcagaatgcttgtaagcagagtacagagaacaatgtgggccctggggattccttcaggttccacctgttgcaaaggccacagcccctaccctgcctctagttcccctgctcttcaatggagcacagtattgccctgatctttgtctgcatggcttattgggaaattaaagtttgaactatgtgtaccacatagaaacctgctctgtactgtaatagatctcatgccaccatggccacggagaagggcactcacagtaatgtggacagacaaagctgagtctctgtggctcagatccccttgtcgtttttgcctttagaggggcaggaaggtgctccgtccctagtatcactgacttcagatgcaggtcgtggcatttggtagggtcctttcccagattggcatgtctggagactttataatctcaagtgtgtgtggatggggtggtatggggggtgggggcattccacaacattccatggagcacctaagctgatttggagcaaggatgtatggactaataagtaggttccaacctgatggagccatcccagtaccaaggggctcctggacttaagggatttggaggagaggggcttggggtcagggcagtaagtcacagtgtgtatacattgatttggatggggcctgtgggacatgttaggtgtagacagcaggagtgacccacctccttcttgcagggcatactccttccatgtgagtgctgatgggcagatgcaacctgtgcccttcccccatgatgcactagcaggccctggcattcccaggcatgcccggcagatcaatacgctcagccatggagaggtggtatgtgctgtgaccatcagcaaccccacacgacacgtctacacaggcggcaagggctgtgtgaagatatgggacatcagccagccgggcagcaagagtcccatctcccagctggactgcctggtgagtcgctagggccacacaaacttattctgtagcatgtaggaggtagaggaaaacaggacagacacacccagggcgggaagggccaggctctgctctgagcagctctgggtatgttgactaacctctctggccctagttggggcatctgcgaatggagatgactcttaggctccagattctagagaaaagcatgagaaattggatgggtgtagaattgagagtggagaagtctccaggagcttagacactttataaggatgttaagttacctaaggtggctttcttgatccatgacaaagcaagtggatagcacttaactctgcccttcttcttccagaacagggacaactacatccgctcgtgcaagcttctccccgatgggcgcannnnnnnnnnnnnnnnnnnnctcaccatctggggacctggcctcacccacaccccgcatcaaggctgagctgacgtcctctgctccagcctgttatgccctggccatcagtcctgatgccaaagtctgtttttcctgctgcagcgacgggaacattgcggtttgggatctgcacaaccagaccctggtcaggtgagtgaggttggcaagggaacacctaggctgttcatactcacccagcccatgatgttggtccttttggagaagtaaagggtggtcaggtacagaggcaaagggcagctcatggagggccccttcagcctaggagcttgggggaagatgtggtggaaggcagagctttgaacagttctgggaaagcagctcgaggagtggagatagcagagagtggagaaatgcagcatcgcttaatggtgaggcccaggtggagcagagcagctgagctttgtgtgtcctgtctctgagatgtcctgtgtagcttgactgggttctgtgtgacctgggtggtgtggtgtcttcctctgagtcacactacctgtgtgatggtggacggcagttcctgcccgaagtcacatcctagtgttaccatgacacccttgggcatgttttgggccatagccttatagatgagttaacttaaatagggacagcaaagactgggttgaggagtgtgtcccaaaggcaggtcctaaacatgatagaaaatcccttagaatctttcctgccttcgtctccattaccttctttagagcagagtgggctccccaggggtcccacctagatacattgaatcagacagaggtcttttctcagggaaactgtccttggtagcacccctgagtggactagcagaggcctggtctagctcggcttcctgttggctaaggttttgagacacgtgatccagtgttttgtacttccagtttccttctagcttggctgcgtagctggcccagtccttgggatgattgcagtctctggggctcacccttcttccttgcttggccttcataggcagttccagggccacacagatggggccagctgtatagacatctctcatgatggcactaagctgtggaccgggggcctggacaacaccgtgcgctcctgggacctacgtgaaggacggcagttacagcaacacgatttcacctcccaggtgtgtaacccaagcactgtgtgcttcctcttgggccccagcagctgtcaggggacagagtgaccacacagggtcatgattgactgccaagggaccagcccgagccaatccgggaaggttgcttgtaagcagcagcagtggtgtagactgggcatgcatgccctcagaaatgggcacacacccaactcattctaagtccacagcttgctccctgtgctctgcagtttgcgcatgctccctcccagctctggggtgggcacctgactcaagcctcctgtgaacctcgcccatgagccatgatatttcttgcttgttagacttgcttcatccttttaacagtcagtaccataatgtggagtatagtcgttgccagtttcttagggagtgagctgagcatagctttcagggcctgggaattgcagcccctcctgctcaacctccaaagccagcttcctcaatgggatacaaatgacatcctggggtggcgggtaggggcaacagacagctggttagcggatttgtttgtaagtggtgagggaggagggaggaggctctaaccctacccaaggggctgctccagccctgcgggtagagggacactgaactgtctgtccttgcagatcttctccctgggttactgccccactggggagtggctggccgtgggcatggagagcagcaatgtggaggtcctgcaccacactaagcccgacaaataccagctgcacctgcacgagagctgcgtgctgtccctcaagttcgcctattgtggtaagccctgaagccctagcctggcatgagagccagcatggggagcctggtccagtagacagtggggaagtaggggacccacagtcttgagtcagccaagcttatgctcctttaatgtcctggaggagaaaagtaccttccttgtcccccacccttgtcttagatatggatgtcactccaggacactaaactctcaggacagtaggctttccatgttgacctggatcttctctgaaggttacacatggtgccaactcttagcctcagagaaactgtctgggaagagtacgtggctgtgggggatgttaggagccacagctaggagcgctcttggaggaacgtcctctctgactattggtctttggctgtttctggtgctctctccaccttctggtcatagactgggaaggactagctgactttagtggctttggcagggatctttttgggaaacatgctcaacacagttaattgcattttgttctgttctggctctccctctgggcagcaggggaaggcatcctctaggtatctgtgtgccatgcttgtaactgctcttcaggagtggagaacagcaaacactaaaaccgtggtcaagcatgtctgaggatgtttccacgcggggcagacacagctgggttgggtcctgctgcacaaggcagcgagccacagtctgagggctcctttgcttgccttgcaggcaagtggtttgtgagcactgggaaagacaaccttctcaatgcctggaggacgccttatggagccagcatcttccaggtacactcctgattttcctccccactcctcccgagtcgggatgcggccacagcagttgggctgagggtagccggaggcaggacaggaggagtctggagctaggagcagacctactaacccctacccccactagcccttactagatggcggaccccagagggaaggatgtgaggaccagataaagacacaccctctgttgctaaaggcttgtgaatccttgagggtaagagcatctaggaagggactcactcatgtggcacctggtgcgtaaaatagtgagcttggctggctctgggcagctgggcccgtggagtagccatttcacccactgacacccattgaggtcaggatggccaccctaagccatcagtgtgatgagggggctagaatggacatgcgtttctacagatttaaagatctagagcctctccatttcagacacactcaatcctctctccctggtgcaacttataatcacttttttcttacaaccactcttgctcttacacacacacacacacacacacacacacacacacactcttcagcttcctgtgccacgtgtgtcccttggaaagtctctagttttgttgagggcctgcaaacccaggaccagtctttccagctggcctggctgaatgaagggtctgtctcttgcggctgtggctctgaagcgctccttcccatcagtaaacttagcagagatgcttatgctaagtgtcctgttctcatccttaaacctggggaagatcctactacagccagctcaggaggtgttccagatgaagaggcaggaggaagggactccaagccgcagaggaagtgggcctctttctaccagcacctgctcagcctgagccggagagtaggatgcgatttcgttcagagccctgaagtgccagggagaattcctgtctgttttctccccacactaaatgtcttcctgtttctccatgtcttcctcccccagtcaaaagaatcctcatctgtcttgagctgtgacatttcagcggatgacaaatatattgtaacaggctctggtgacaagaaggccacagtttacgaggtcatctactgaacaaggactctaacaggcctgtcaaactctgggagagacacccacgtggccctgacagggagatgctggccaggccccgaggacggcagaaggagggagcagcattgtggggctgccctccagaaggtggagaggacgcacgccccttcgtggattgatgtgtctgacagacttgaaggactttctcctctccccctaaccagtgctggcagatgcttcaattagatttctctggaggcttctgcttccgtttctcccacagacatcctcataagtctctgtctcttcctcccttctctgacctgtccccgccccactctgggatggggggcggggagatgcaggagtagacattgttgtttctggggaggggcgcctcgttctgattgtgcagtgcacaaggtttgtgaacagtgtaaataagagactggttgctgactggccagtgagggaggaaccccatcccaccattgctcgccgtggattttgcctgctgtatttgtaacccactcatggtggtggcttttctttcttttcttttctttttttttcctttcttaaatttttttttaccagctgttctgtggggaaaggaaacagagataagagagttggggagccgagtgaggagcttcctggggatggacaagccatcctggcgcactgggactgaagtatatctccacacgggttttagcgccatgtttagatagaatgataggcagatggacagacaagatgatggacagtactgggatgggccagcctgggctattacccacaggaacagcgaggattttctgtgggttgctctgccccatctgtctcttgccttgcccacacacctgacctccatctctttctgtcccctgccttccccaccccaccccaccccgcccccatctttctctttggtgcacactcaatcattgtgatgaggaatggaagttctagggaaccccctctctgactctcctccagcgcagcctagaaaggattccatatgggggtgggggtaggggggagatgaagcgactcagctcagggagctaccagagaaaaacagcaactggtgtgggtgcttttttttttttaatttgaataaaaataattagaagtgatctcctttgataagataccgtctcccctttcctgctctcagccctttctgctccctgaagcggggaaatggtgacccccccccccaccagtctgagaagatgggcgggacagcgggctgggggctggggcagcagtcatctgcagatatcaccccctagagtaccaatgtttgtggtattaggtttgccttgttttgttttggtcttttgttgttttattaaagaaaagctaaagaccgtgtgagccctgctggtgggctctccatggatgtagcatatggaagagagtttttatattgcatttttatggattattttataatgtgggactccgtctgggaaggaagatgagggtgtctaaaaccttcccatctccagagctccagctgagcggctgcccggaacaggatgtatgttgggacatggaaagaccgtggcaccctgcgccttcctgagaggcatgtcgtcgtgcctgtctagagtctgtccatctgtctctgggtttcagatggtcactggccaccacttgttaaggctctagccagaagggagggttagggtggaagagagttattcctgaagaaaaaagaaaaattgaaaagtcattgtaatgaagctttttatatttttaaaagttactatttaaaaaggttggtttgattgttgtgttttaattgccttttttccctccagtgtctcagtcatgcctgggaaagtggggtccatggttggtccagttgcattctggaacctgggaagcatctcaccagaaagtcctcctcccttttccctcctccctcctccctcctccctcctcccaccccatcaaaagtctgtaagggctgttgggctttttctagtccagagcatactacaccactgcctttggtctatgcaccaggcagaagtagactgggaacccctggctaagatgggtctcatgggcagcaccatgctcatatatggctgtccacggaagctatttgagcaaaattaggaaatttcaagtgaatatcatgtaagtagttcaagtaagcgtcatggtcctcgggacccagaaagtctgcattttttttcttgtaagcttcattgatgtagatgtgacgggagatgttaagcctggatcacagaagtgtacttttaaacgctgagcaaggcagaccacgggcaaggccaggtgaatgatcccaagaaggctggaaaagcagaaaagactgaaaagtagtttcctggccttcgtatacctacccatcgctgaaataagcctctcagaggaccaggattttaatggtgctccacttgttaatgtatcaaggtcactgtcggtcacaccggtaacctgctgtcccttcatggaaggagagtgccagcaaacaagggagggtcccagaatgaagcagtctaggcctggatagaactgctgtccacctggatcttgacagaagggctgcagggaggagccagcctgaggctgtgcactgtgacagcgccatcctgaccagcatgccctccagaccactctcttctccacccaggatagagcaaggagccagggacaacttggagctggttggagttggtccttgtgggtgggggaggggacagaaggccactggtaactcccaatagtttctgacagctcaaatacctggagctatctggtcagggccccagagagaaggtgactctccagccaccatatttgcttcccagatacccccatctccagatgattgttttcaaaggctcaaaagtatggcagggctaaagggtctcttcacaaggggttataaaataaccactatccccaaatgatgggaatatagaataggaacttggaaaacattttttagtactaacaatataaaatattctacatgcccccaaaaacaacaacaaaaaacaaccaggaagaggttcaggtataatggcatatgcctgaaattgcagcacttagaatggaatggtaagtggatctctgagttcaaggccagcctggtctactgagtgagcatattctatacttaggatccatttacaactattgcaccagctggctgaggcaagatgatcgctgtcagtttgaagctagcctgggctatctagtaagtttcaagtcagcttgatctacaaagtaagaccttgtctcatcctctccctactgcatccccagccgccaactctgaaaaaatacaaaatgacctttggtgtgtgaaaggacattctaaattgagtctttgattttttttatttattttttttttttactttttaacacccaagtctaagccatttcaacctatcacgggtcattgtctcaggaagggtagaggaccactgggtaggactcaacagcttgattggaaggaagactctaatgtagggagtaaggctacctgggccttctccgaaactactggttgaaagattgcttatggagggcagatagcccagagcagtcatgggactattctagaactcgcctgttagtcttgctcatctatccatcatcaacagcctattacctactcacatccatctactcttcactcatttatctagcatttatcccatccatccatccatccattcatccatccatccatccatccatccatccatccatccatccaatgtgatagactctcataagttctcaggcctggttctagtggctaagatgtaaggatcaatatgacaatcctttcacagagctctcagtcattgagagacaatgacagaaaccagctactatgctgtgaaatgtcatggcaagaggctttaacctgggcaagagactcagagcaaaagggcgcccaggaggaagagctgagcatacctgaaggatatagatgacatgccaaaaggaggtggggaggaatgctgcagagagaaggaacagcatgttctaaggtacccaacccaatctagttctgaccccatctttcttcctgccccagcccagcttgtcaagcttcagttcttggtgcctcttccctgttgttccccaggatgagcagagtgatggagagtcctgggcaaagaagatgcaggggactagggaaaagatagaccaagggtacagctcaggagcagaagggtcaatgcccatgctgaactctagacctctgggttcccagtgtgattgccattaaaagaccttaagccaaccattgccaggcccttgtttaagtaacatacctacctattctaagccactgtattcacatttcccattcctctgcttcctttaacttaaccctcatgaattcaccattcctgttgcctgacccctactccagacagacaaatagatgtatgggcaggtggatgtgctgatggatgtgaggatggatagatatatgataattagatgatgggtggaaagagaatggatagataggtaagtaaatggatagatgtgtgggtggagggatgggtgtatggatggaaggatggataagtatggatgaatgtgtagatggaaggatgggtaggtatgaatagatatatagatgggtacatggttggctagatcataaatagatggacaaattgattgggaatttggatacatggttatatagtagatttctgcttcatgggggcatgctcagagtctcataaagaactgatctcttagtgggaagagatgagaaatcttggggtgacaagtaagggaagaaaacccagagacacagagaagtccctctggtgagctcagagtcttccaatgttagaccctctactccatgctctccctggctcagagcatgcctcctgtgatgacagaggggaagacctactgagtatgacaccatctcaaaggtagaatgaaagaggaaaaggccatgcagcataggccatctctctgcttcccagcagagcacattgctctctatcatgacgttctcatccacagtccagaaatgacagctggcaactaccagctgagaactctgagcccaaataaacagcctccactaggctggctcgggcattacgtcatagttatggaagggctagcatactttccaggcagctcagaaagagcagaactgatggctcacaagtgagactttggggagttggtgactacatcaagccaggtgactggggctgtataccctgtgtctcctgggattcaagtggaagaaaccctaactaatacaccagcacacgtgtaaaaagtttggcatgaggagggtgagcatctaactccaaccctgggaatctgagatgggtagatcctgggatgcttgctggctagctagtgtaacagtgagcttcaggttcaaggagagaccctgcttcaaagagtgaggtggacaagcagttaagaaagctatccagatgctgatcgcttttctacatgagccacacaaggcagatcacccccatacttatatagtacacacatgcaaaacggagggagatcaacatgctggactaattctattttactagtatatctgatagaaggagagcccttagataaatagaaactcagaaggcagaatgaggagtccccaagcttagactaacacacccaaaactacatgaagcagttggcagtcattctgttatgacctaagcataagaaatggaggttttatgtaaatgaggaaaatacctagttaataaataaataaataaataaataaaaatttaaaaaaaagaaatggaggttttaaaaaggcttaaggggaactggtagaccacatggagaagagtggacaagggtaaaaagggtttgaatgacagacataactgataaagggttatgacacagaaccatataaccaacctttggaaaacaagcaaggtttggaaaacaccaggtgactcaggcttatcaataaaactaaacagataaagagcatacaaaggtcaacactcactcgacctttttttactttaatttttggtataaagattttatttctattttacatgcatgggtgtttgcctgaagatatgtttacacattacatatgtgcattgcccatggaagggtaagagtatgtcagatcctctgaaactagagttatagatggttgtgggccttcatggggatgttgggaatcaaaccctggtcctctgaaagagcaggcaatgttcttaacagctgagccatctctgccagttcctgtgacttttcttgacatatcaaagtagaaagcatagtgtgtggctatactaagcctatagccaagtattaaagttgacaaagttttagaagtattattttagcaagaataaagccaagaatatttttttatgatttaaaatttttattagcatatatcagtcatacaaagtaataggtttcattatggcactgtcagtgtctgggcttttatgatatttacccctcaaattaaccaacgtaataaggcaaaatgaagtgataaacacggatccaatgattgaaatgaaacaaggctgtaattatttgcagacatcttgtctgcatatagagagaatgtacaacaatgaaaacaaataagagagttaagtgacaggatccaggatcaatattcattaatcagtagcactcgattcataagcagaaaccaatgggaaacccaatgtaaaggaaaatgcacttaaaacaataaaactacccatggatttatctacataagatatttatggaggaaaaaccacaccatcctatcaaagattttaaaaatactatagatcacaagctaaactaagtgagtgatttaaaaaaaccaatctcacttaaaaggatgcctttctgagtggtctataaatgcagtattatgcaaagtcagagcaggttgttctttgtgtaatctgacactagaatatatatgaagagtaaggggccacaatatcacatatgactttgacgacaaacagggaatggacagaggatggtccgataacatagagcaatggaaagcatgctatcagtatggtgtagacagatcaacagaacccactcttatgaggcccataaatggaccatatatagggggaagtgagtccaaaacacagatagtggctgcagtggagaaaagcatcctttggcaaatatttcctggacagtgggctacctttccccatacccacagttcaagggtcaaacctaggactttgcatgcattgggtcaccaagctgccttgccacatttacattgccaacatggctctctatgtcacagaacacacgaagatcaatccaggggtctgggggctgtggttaacagctgttttagcttttagcataggagagctgataatgtgttagctggcttttgcatctgtgtaacaaacaaacaagctaacaaaaaaagccaccaccaacaacaaaacaaaagccaccacctccaccacctccaccaccaccaccaccaccaccaccaccaccaccaacaacaacaacaacaacaaaaacccctaacaacttccagaggaagatttctctttgctcacattttcagaagagttggttcaaagtccttggatctgttgaccctggcctgtggaggaacaaaacacgtaggcagcaggaacctgtggcagaggctactcacctcatgatgaaacaggaagcccatgctgtagtaacaagaagggggaggatacgatcccagagacctacttcctccattaggagccagctcccacagttgctccacctctccatagtctactcagaagttgagttcatcagtagattaagccactcatgaaggccaagctggcagggtccggtcactttccatggctggcagccaagaccccctgcatgactctgtggtcttgtaatcaccccatgaccctgaggagagaaagagccattgaacagagcctaggaaacaaagctatcatgagaaatagattagatagatgataggatgatagatagatagatggatagatagatagatagatagatagatgatagatagatgatagatagatagatgatagatagatagatagatagatgattgatagatagatagatagatagatagatagatagatagatagatagatgatagatagctagatagatgatagatagatagatagatagatagatagatagatgatagatagatagatagatgatagatagatagatagatagatagatagatagatagatagatagataaatttgatgttaaaattcaaattgtctttacaacaaaaaatgcccaacaagaaataagaaaacagtaataaaataaaggaatgcaatacttaccatcagcaaaacaagggcacctggattgtatgacaaattcagattcttccgaatcagcacgtgaattcgaaaagctagaggagtaggtagannnnnnnnnnnnnnnnnnnnnnnnnnnnnnnnnnnnnnnnnnnnnnnnnnnnnnnnnnnnnnnnnnnnnnnnnnnnnnnnnnnnnnnnnnnnnnnnnnnnnnnnnnnnnnnnnnnnnnnnnnnnnnnnnnnnnnnnnnnnnnnnnnnnnnnnnnnnnnnnnnnnnnnnnnnnnnnnnnnnnnnnnnnnnnnnnnnnnnnnnnnnnnnnnnnnnnnnnnnnnnnnnnnnnnnnnnnnnnnnnnnnnnnnnnnnnnnnnnnnnnnnnnnnnnnnnnnnnnnnnnnnnnnnnnnnnnnnnnnnnnnnnnnnnnnnnnnnnnnnnnnnnnnnnnnnnnnnnnnnnnnnnnnnnnnnnnnnnnnnnnnnnnnnnnnnnnnnnnnnnnnnnnnnnnnnnnnnnnnnnnnnnnnnnnnnnnnnnnnnnnnnnnnnnnnnnnnnnnnnnnnnnnnnnnnnnnnnnnnnnnnnnnnnnnnnnnnnnnnnnnnnnnnnnnnnnnnnnnnnnnnnnnnnnnnnnnnnnnnnnnnnnnnnnnnnnnnnnnnnnnnnnnnnnnnnnnnnnnnnnnnnnnnnnnnnnnnnnnnnnnnnnnnnnnnnnnnnnnnnnnnnnnnnnnnnnnnnnnnnnnnnnnnnnnnnnnnnnnnnnnnnnnnnnnnnnnnnnnnnnnnnnnnnnnnnnnnnnnnnnnnnnnnnnnnnnnnnnnnnnnnnnnnnnnnnnnnnnnnnnnnnnnnnnnnnnnnnnnnnnnnnnnnnnnnnnnnnnnnnnnnnnnnnnnnnnnnnnnnnnnnnnnnnnnnnnnnnnnnnnnnnnnnnnnnnnnnnnnnnnnnnnnnnnnnnnnnnnnnnnnnnnnnnnnnnnnnnnnnnnnnnnnnnnnnnnnnnnnnnnnnnnnnnnnnnnnnnnnnnnnnnnnnnnnnnnnnnnnnnnnnnnnnnnnnnnnnnnnnnnnnnnnnnnnnnnnnnnnnnnnnnnnnnnnnnnnnnnnnnnnnnnnnnnnnnnnnnnnnnnnnnnnnnnnnnnnnnnnnnnnnnnnnnnnnnnnnnnnnnnnnnnnnnnnnnnnnnnnnnnnnnnnnnnnnnnnnnnnnnnnnnnnnnnnnnnnnnnnnnnnnnnnnnnnnnnnnnnnnnnnnnnnnnnnnnnnnnnnnnnnnnnnnnnnagagagagagagagagagagagagagagagagagagagagagagaaccttaagaaaacattagaatgtagtttagaaatttgtgtagttgatctggtatgtttttccccttatacttatatactctacagttaaagatttaaggaaataggagatctgggaagatcaaacttcgtgaggagttgccgccacaatggtttctgatgactgacagggtctctggtggcatggcattcccaggagtaaagaacccagctcctgtagctcactgtgtcacctgggaaacacttgatctctctagtccccagcccagcaccttaccatccaccaacacattctgggagcctacgcgagccattcctggctgtcttgtgctaatgattctgttagcaggcgagagcagctgtctcatgcagaaacgatgtgggtgaggtttgtttagctttttgattgtgaactacaagcatagacagttgagggggacagtgtaatgactccatgaagctgtcacttgccctcaggaaatcacacctgagcaccccagctcatccactcacgatgtatcgcttccactggatgcttatctgggaagccgcagacagttcatcactgaaagagtaagaatttttaccaagtccaaaaggtaggatctagttg

SEQ ID NO: 206 - DNA, 2840 bp, Mus musculus
ctggcttccgccccggcccctctcctaagtcttccaactcgcgctctcggcacttggccgccagagcccttttggctttgggggtggtcgggatgcccgcttccgggccccgtcgggagagcgttgaaaaacttgctgggaaggttctgggctgtggggtggtggccttgcggaggctcccggcggggagggggccagggacccagaggaggcacggggccgcgtggagcccttctgatgtgcccactcctctcccctatgtgtccttgtgggctccaggcaccccatcaacccgggcagccgggatttaaattcactgtggccgagtcctgtgacaggatcaaagacgaattccagttcctgcaagctcagtatcacagcctcaaagtggagtatgacaagctggctaacgagaagacggagatgcagcgccattatgtgatgtactatgagatgtcctatggcttgaatattgaaatgcacaagcagacagagattgcgaagagactgaacacaatcctagcccagatcatgccttttttgtcacaggagcatcagcagcaagtggcgcaggctgtggaacgcgccaagcaggtcaccatgacggagttgaacgccatcatcgggcagcagcaactccaggcccagcacctctcccatgccacgcatggtcccccggtccagctgccaccccacccgtcaggcctccagcctcctgggattcccccagtgacaggaagcagctctgggttgctggcacttggtgccctgggaagtcaagctcacttggcggtgaaggatgagaagaaccaccatgaactggatcacagagagagagagtccagcacgaacaattccgtgtcaccctctgaaagcctccgggccagtgagaagcaccggggctctgcagactacagcatggaagccaagaagcggaaggcggaagagaaagacagcctcagcagatacgatagcgatggggacaagagtgacgacctggtggtggatgtctctaatgaggacccagcaacaccccgggtgagcccagcacactcccctcctgaaaatgggctggacaaagcccgtggtctgaagaaagatgcccccaccagcccagcctccgtggcttcctccagcagcacaccttcctccaagaccaaagaccttggtcataatgacaaatcttccacacctgggctcaagtccaacacaccaacgccaagaaatgatgccccaactccaggcaccagcaccaccccggggctccggtcaatgccgggcaaacctccaggcatggacccgataggtataatggcctcggccctgcgaacacccatcaccctcaccagctcctatccagcaccctttgccatgatgagccaccacgagatgaatggctccctcaccagcccaagcgcctatgctggcctacacaacatcccatcccagatgagcgccgccgcagccgctgcagccgccgcctatggccgatcgccaatggtgagctttggagctgttggttttgaccctcaccccccaatgagggccacaggcctgccttccagtctcgcctccattcctggagggaaaccggcatactccttccatgtgagtgctgatgggcagatgcaacctgtgcccttcccccatgatgcactagcaggccctggcattcccaggcatgcccggcagatcaatacgctcagccatggagaggtggtatgtgctgtgaccatcagcaaccccacacgacacgtctacacaggcggcaagggctgtgtgaagatatgggacatcagccagccgggcagcaagagtcccatctcccagctggactgcctgaacagggacaactacatccgctcgtgcaagcttctccccgatggcggcacgctcattgtgggtggtgaggccagcacgctcaccatctgggacctggcctcacccacaccccgcatcaaggctgagctgacgtcctcggctccagcctgttatgccctggccatcagtcctgatgccaaagtctgtttttcctgctgcagcgacgggaacattgcggtttgggatctgcacaaccagaccctggtcaggcagttccagggccacacagatggggccagctgtatagacatctctcatgatggcactaagctgtggaccgggggcctggacaacaccgtgcgctcctgggacctacgtgaaggacggcagttacagcaacacgatttcacctcccagatcttctccctgggttactgccccactggggagtggctggccgtgggcatggagagcagcaatgtggaggtcctgcaccacactaagcccgacaaataccagctgcacctgcacgagagctgcgtgctgtccctcaagttcgcctattgtggcaagtggtttgtgagcactgggaaagacaaccttctcaatgcctggaggacgccttatggagccagcatcttccagtcaaaagaatcctcatctgtcttgagctgtgacatttcagcggatgacaaatatattgtaacaggctctggtgacaagaaggccacagtttacgaggtcatctactgaacaaggactctaacaggcctgtcaaactctgggagagacacccacgtggccctgacagggagatgctggccaggcccgaggacggcagaaggagggagcagcattgtggggctgccctccagaaggtggagaggacgcacgcccttcgtggattgatgtgtctgacagacttgaaggactttctcctctccccctaaccagtgctggcagatgcttcaattagatttctctggaggcttctgcttccgtttctcccacgaaaaacc

SEQ ID NO: 207 - DNA, 2316 bp, Mus musculus
atgtgtccttgtgggctccaggcaccccatcaacccgggcagccgggatttaaattcactgtggccgagtcctgtgacaggatcaaagacgaattccagttcctgcaagctcagtatcacagcctcaaagtggagtatgacaagctggctaacgagaagacggagatgcagcgccattatgtgatgtactatgagatgtcctatggcttgaatattgaaatgcacaagcagacagagattgcgaagagactgaacacaatcctagcccagatcatgccttttttgtcacaggagcatcagcagcaagtggcgcaggctgtggaacgcgccaagcaggtcaccatgacggagttgaacgccatcatcgggcagcagcaactccaggcccagcacctctcccatgccacgcatggtcccccggtccagctgccaccccacccgtcaggcctccagcctcctgggattcccccagtgacaggaagcagctctgggttgctggcacttggtgccctgggaagtcaagctcacttggcggtgaaggatgagaagaaccaccatgaactggatcacagagagagagagtccagcacgaacaattccgtgtcaccctctgaaagcctccgggccagtgagaagcaccggggctctgcagactacagcatggaagccaagaagcggaaggcggaagagaaagacagcctcagcagatacgatagcgatggggacaagagtgacgacctggtggtggatgtctctaatgaggacccagcaacaccccgggtgagcccagcacactcccctcctgaaaatgggctggacaaagcccgtggtctgaagaaagatgcccccaccagcccagcctccgtggcttcctccagcagcacaccttcctccaagaccaaagaccttggtcataatgacaaatcttccacacctgggctcaagtccaacacaccaacgccaagaaatgatgccccaactccaggcaccagcaccaccccggggctccggtcaatgccgggcaaacctccaggcatggacccgataggtataatggcctcggccctgcgaacacccatcaccctcaccagctcctatccagcaccctttgccatgatgagccaccacgagatgaatggctccctcaccagcccaagcgcctatgctggcctacacaacatcccatcccagatgagcgccgccgcagccgctgcagccgccgcctatggccgatcgccaatggtgagctttggagctgttggttttgaccctcaccccccaatgagggccacaggcctgccttccagtctcgcctccattcctggagggaaaccggcatactccttccatgtgagtgctgatgggcagatgcaacctgtgcccttcccccatgatgcactagcaggccctggcattcccaggcatgcccggcagatcaatacgctcagccatggagaggtggtatgtgctgtgaccatcagcaaccccacacgacacgtctacacaggcggcaagggctgtgtgaagatatgggacatcagccagccgggcagcaagagtcccatctcccagctggactgcctgaacagggacaactacatccgctcgtgcaagcttctccccgatggcggcacgctcattgtgggtggtgaggccagcacgctcaccatctgggacctggcctcacccacaccccgcatcaaggctgagctgacgtcctcggctccagcctgttatgccctggccatcagtcctgatgccaaagtctgtttttcctgctgcagcgacgggaacattgcggtttgggatctgcacaaccagaccctggtcaggcagttccagggccacacagatggggccagctgtatagacatctctcatgatggcactaagctgtggaccgggggcctggacaacaccgtgcgctcctgggacctacgtgaaggacggcagttacagcaacacgatttcacctcccagatcttctccctgggttactgccccactggggagtggctggccgtgggcatggagagcagcaatgtggaggtcctgcaccacactaagcccgacaaataccagctgcacctgcacgagagctgcgtgctgtccctcaagttcgcctattgtggcaagtggtttgtgagcactgggaaagacaaccttctcaatgcctggaggacgccttatggagccagcatcttccagtcaaaagaatcctcatctgtcttgagctgtgacatttcagcggatgacaaatatattgtaacaggctctggtgacaagaaggccacagtttacgaggtcatctactga

SEQ ID NO: 208 - DNA, 69173 bp, Homo sapiens
  misc_feature (27560)..(27579): "n" at positions 27560 through 27579 can be any base.
aagagtctcccttttctagtaggccatttcacaggagcaaatgagatgtgaaattagagctaaaagactcccaaagcacgaggaaacacaagatcctcggaatgaggcatcaccaggacacctaaactataaaacagataaaaattaaggctgttctgattgaggtggaggaagcgatccctgtgaccactctctttacttcctcatcttctcagcactcccatcaacttctgaggatcccaggacctccttagggcacaatttgaaagcttgactggtttacagaaagaatcaatgccaatgccagaaggcctaagtctggtcagaattcgccatcgtcaacttgtgtggtggtggacaaactacctaaccttccttggccctcagcttcttcatctgccatggagataattttccctgctctacatgttgcgtcttaactagaaacccacagacacgacaatgctttaagcagaaaacacaagacaaaagtaagatggcgttggttttgtttgtaccttgcttcatactatagattttttgtggtaggttagtggtcaaataataagttggacctccaggccctcaaaattgagtctttttttttttcagttccactccaacatcaaaatctatagtcatctatgtgcctttcttacaagtgaagcccctttgccccttttcttgcccccatttctctctacttccagaactcccaggtccacctgcagcctggaccttcagagtccccatcagtctcttgtgtttgccccccaaccttgttccaacccacccctctctggttgccccatctccctcttgcagaacctcaacttcaggaagggcactccccaaaaaggcaaaaaataccccatcaccagtccactcctccctgccaaactccatacaacctaactgcatttagccttccaccctgacatctttcagggatgtgccaacagcaacttttgtgactattttccaatgttacgcaggcacctaatggccctgggctgtagtccccacttggaggagctgccagaggatcccaggacttctctagcattagctcttcataaagagactttatctgaatgactagataattgctaacttgtagagcaatctttaaaatggctcaaatactgcacaaggcaggaacctagagctgggggtatttgaattactttctagtagagagggcactgagagtagaggacagaggataggctttggagacagaggggcctgggctcaccaatcagcttcttcccttcctgaacatgtgacactttccttcctgtatctcagtttactcatctgcaaaatagggacatagagaatggcactatcttttttttattattattatactttaagttttagggtccatgtgcataacatgcaggtttgttacatatgtatacatgtgccatgttggtgtgctgcacctattaactcgtcatttaacattaggtatttctcctaatgctatccctcccccctccccccaccccacaacaggccccagggtgtgatgttccccttcctgtgtccatgtgttctcattgttcaattcccacctatgagtgagaacacgtgatgtttggttttttgtccttgtgatagtttgctgagaatgatggtttccagctgacaatgacactatttattaagattacatgagatagtatatgtcaggatctctcaacttcaggactattggcatttggggctggataattcttagttgaggagggtgttctgtgcattgcaggatgtttagaggcatctctgttctgtacccaaaggcactgctaccctgagttgtgaaaaccaaaaatatctccagatattgcccaaattccccttggaagcaaaatcaccctgagttaagagccactggtgtaagagaacacgcttgatacaaaatcaggctctcactattgctggatgtatgtgacaaactcacgtttataaattcatttattaaaaagatacaaagctgataacagatctgagagtgaaaatcaaatctgtcaggcaaataccctctcatctctcgttccctccccattccccatcccaactcagaacctccatcaaagaccaggtatgccgggcacgaattctacctaaatgatccatactgaccccagaactcccctccactggcgtggataattcttacagcgtgggcctccacccttgtgaagttgaatgcattaataccagcaaaatatttcttaatctcctaagcctcagctttgaatccttaaaaaggaacgaaagaaacagcacaaatctcttaattagaatgcccaatcacttcgataaatatttacccggttcgggcatgaggcatggaaaccctgtgccattagtcaatagaggtcagcaaagtgcaccttgggaacagtgggatgcaattcagctcaactttggagcgggtgtaggggagaatgtttccaggcttatgcttctgctaaagacaggtgaacaaacacattccatgcctaccctgcacacctgcccccccacaaagtctcaggtgggcatgagggcctcattgtaaatcatcgcctggtagtctggcttccaaagctttctggagagaggcagtggcttcctctgctagttgggccatggagcaaaccaaaccattccccagtgagtgttctctgtagtgccctggctgggtacctttgctcctatctggagctctcttccttcctcccctctgagccacagcaagggccaccctctataggcagcttccctaatagtcccagtccctccccacccccacccttctacccaataccatttccctgcacaggctctatttaactctgagggcctagatacagcctggaatacaacctggaactggggacagtctggccttgtgtatgttttcgaaggcaagggctttccttagattttggaggtaagctttctgcagattcttgccaggtaagaaattaggtgccattattctcattttacagaggtaaaaatggagaccccaggagtttcggggtcttgcccaagatcttgcagatcttccagactcctgaagcccaggttggtgctgccacacagtccggatgagtggatccctctctcctggctgtagtaaccttcagaggcatcctcactggagcctgaaatgggagtcgggataggggcagggtcttagagaagcaagctcttagctccgttccccagggaataaaaacagcttgtcaggtggcaaaactaagaaaagaccaaggaagcagaaaccacccaggtgcggggtgagggggaagggaagggtttcgatagaagtatttgttcatcctgtcccctctgcccaccacaacttctgtccatccttttgagctgagctcaagctccagccttccaggaagcccttccagaaccacccttctcacaactgttctcccccacttcatactttataggcttactttttgtggcttgtcttctcagaaatgctatgaatattgcactgtggtggcagacagatttctctctgcctctatccactcccacctcaccccagctttagctttgaattgcccctccccattccttccttcccctctcctgcacactccaagggtccttgggcttcagggatgcccaaggtcatctgaggaccatgataaagaatgggattcccagagagggagaggaaggcccagtgacctcgggagggccttcctgagagtccagaggagaggagctgggtgttcccacctgggcttggctgtgtctatgcagaataaggttggggctgctgcctggcttgctccccccagggctgggatagaagaccttcctagcctctccaggcacgcagaaaatgttggaggagttgaatcacccagatagttgtacattatcatcatggccaccacagctaactgttatcgatcacttaatgtgccaggttctgtactaagtacactacatgcattatctccatcgattctcgggacaatcctcctcaggtactggattgttatctccactttacagatgaggaaatggaggcttagcaagattaaataagtcccccaaggtcacatagcttgaaccagtcagagaatgggaagacgagttgggagaccctgggaagtcctctccttccactagccttggtcctcttccctgagatgaggtagctgcaggatgagctttataggagctccctctggggccctccagattcctgtggtccctcttgcagccctggcctgcattctcaggaaagccaagcttgtagatacagcagggcgtagtaggtaagggcaggcacactggtgcccaattgcctgggtcctgtccctgggacactgatgcccaaatgcctgtgtccatcagtcactgatgtgaccttgggcacatcattgtaccactgtgtatcaatttccccatctgtaaaatggggctgatactcatggcacccacttcatttcttgtgtgagtattaaatgtgttcatatttgtcaagtgcttagaatagcactgcacacagcttgagcactatgtaagagtttgttaaataaataaaaatttccctttcttttgctctatgtcgaggtgcttgcttgtggaggaaggtctgggatgcccggtgagtggaggggtgggggtaggggggacagaattactctagtcatgaagacaaagcaattggaggagccctatagaatcaaccgagggggtgtggcatggtgagggagatttctgtcctctctgagaagttccaacaagaggcttccacaaatcaaagccagtggaggcagtagaggaagggatgacagggagaggtttgcaaccccacccacggcactgtgatccattcctcaaataggtgaccacagcctggtggctggcctgagccataccctttaattcctaagggggtaaagcatatactaactcagctaaagtgcttgaagaatattttaaaagactcagagaagtggctcctcggactggcagacagttgctcaccagccaccttgcaccccaaataaggggctgggggctggggagccgctgctctgtaaatccaggccgggctttctgtctcacccgggtgacttttttttttttttttttaatgtgccaggaattcctctcccacgtggggtggactccgaggtactcaattaagcagccaatgaaaagtcagctctccggtagcaaatgaccctgacacttcttgtaacataaacagttgaaacgtttccaattagaactggagacagagacgtttgaactctttctctcgactcccctccttctttaaaataattgtcaagcctttggacggggtgttgtatacatgttttttattttcttttctctttctccagcataaaagacatgtatttttctccttgtttttcctaatttgtggggtggcatgttggggcggggtgggggggtgcggggagatagcggtggtaagcttaaagggatgttggcctggttccttacctccctgcccccttcctgctcagggttcaggcagccggtgagagcggggagtgacgctgggtgaggagtgagtgggagctacaggcaggagaggcctgttctcccaaagccaggctctcagaaagggctgggcatgaatgaatgaatgaatgccttttcttcagcaaaaacttgcacgtatccagcttgcgtaagcaaaggggtcgctgaggttggccattaaactggctgccctggattcgaatcctgaccctctgcccagctcggggcaaatgattgagctttctcagcctctcttttttgctctataaaatggggtccccagccaaactgcttccctcgggagtgaggtaagggagaggagagcgctgcctgggtagcagtgccctgccttgtacctagtgagcgctcaagcgctgttcttcctgactgcgtagcgtggttctaccgcccggctctgcggaggaggcggcgctctgcaaaaccgcgtcggggacacgcagccgcgaactcctccagcgtgccgggctcggccctggcgctggggctcacaggtgaactcgacgtgggtctgccctgctggagcgctctggctcgtgtggtcaccggggggcgtggacgtcggggcaggagggacacccgggcgagagacagagctgctgtccttttctgtacacaatcttcggaagacccgacctgggggccccgcggcttctcggccgcctgctggcgggcgccgtcggagccagtccagagggagactgagagggaggcccggcgaggcgccgcgtccctggcatcttgaaggcattgtgtttaataaatccgagcgagacgcacacccgctctcatccccctctcctctcagctcccaaatcgagacctgctgtaggacccccagtttacggggtcttaaaaccccctctactttgagtagcagcttcaaagagctccctttaaagttcgccccctcccccgcccccacgtcccctttcacaggccacccctcctccaccactccttctagacttctggaggacgacgacaacaaaacactaaatgcaagtttaaaggggggaggggaaagtcttcaggcttcctccagaacgtgggctgtggaagtgacctgtttcaggcgtgcgcaggagtcgccacaccgtagagtttgggttttctttttctttcttttttttcctcttttcttttccttcttctttttttttttttttttttttgtttgtgtgtgtgtttttaccttttattatttaaattgatacgtttcattactagggagaaaaataaaatattcctttgatacacaaaatcaaattgatatttagcctctgcttacttttttatgcatggctcctttataccacatggtagtgacagattgtttgagctggaaggaaaagccattcaaagctaattaagcagccattccaagcactatttgcaagcgggaggctcagaagcctcggcatttgtcagcgctcccccaccccgcgtggttttgactgacagctctggccgcggactgacagggcccagcagctccgccaatcagcaacgaagagccccttcggcggtccgtgattggtgactcgcaccttgctcggaggcgtggtcggcgtcccccacgtggggctggagcgagaaatgggcggggcgagtaagaagcgggtgcgcccacccgtgacgtaagggggagggcagagaagggggagggggaaaggaagcgccaaagaggagccattttgtttctaatgaatgctgcggccagatgctcgcatctgtcgagccgggcttctccctcccccgtcttcggtgcgcgccgaaacacgatttatgtttttatttaggagaataaataaatgaagaggggagcgcggttcggggctggcggccggagcgggcgcggggaggttcagttctgaggcgggtgctcacgtgtaactccccgcgctccggcctccgagcgcccgctagctctcagctcctcattaagatgcaaaagcgaacctccggctcctaatgaggggaaaatatagatccggggacgcgcggccggctcgcgcgcgggctcgcggacttgccggggagggccccgggggtcccgccttggccgtccaccgggcggtgcgcgctttgaggtccactccctgcttgctcgtctgccccgccgtaaccccgagcgcgggagggcgaggccatcggtttgcgggcaagctggccccggagtcgagtggcctgtgcgaccaagcggggggtccggggggcccggggccggggcgagcgagcgggggagcgtccgcgtccctcggagtgtccaggctagcgaccgagacacctacaggcttccgccaacgccgtggcactgccgggagcaggctgagcaaaccaggtgggaactcggagttcccgggcctcggccgagcagggtcccgacccccatccccaaccccctcagcctggggatgcagtgaggagcccgcgcggcgaggctgcgtcgagggtgaagttgtgcccacggggaaggcgccccgaatggggccagccgtggctgagcctgttgtccacgggcagccgggcccttccatctgcgctgcccgcctagccagagtccctcagacttctcctcgcaggcagccgccgcacatcaaaggagctgtttatttggctttctgaaaagaagggcgagtgaacaaaggagagctgggggctaatgtgggggaggcgggcagaagaaggggtgaagaaaaggggacatcctgagttccgagcaaatttttaaaggtcggaggcaactttaggagccaccgttttatcagtcctaaatcttttgaagtgaaaacattaaagtgacaaagtgattgtttgttttatagtatctaattgggctgctttgcagacctaatgagattagagggaggaatcgttcgccgccgctgcagaataaactgatacattactaccagccacaggttttgaagattgtacagcttgtcttattttcttttgttgttattcctctgtcttccctctttcctcctcccgctaaataattatttgctagtagaccgtgggaaaaaaaaggaggaaaaaaactcgagcagcccaggactataatatatatctatttattatatgtctttcggttaattcctgatctgaggagcgctgtttttcactcccatgcgaaagtcaccagcgggtagggcctgattgctacttttcatgcatagttttagacacaagagggcattgtgacgtcgcgcccagcggcacccagtcgtaggccgagtcccgcagccccacgtgggggccccgcgctcccattggccagcgccggacgaagctgccacattattttgttacttttcagtccctatttggaactgctctcgcggcagttcagacctcgtgctcgtccccttcgcctgtctgtgtgtggtatccgtaggtccggggcactttttttttggtgtgtgtgtgtgtgcgtgcgcgcgtgtgtgtgtgttgggtgtgtgtgttttgggggtttgccggggcgcggagaggagagccgggccgaggggaaggaaggaagccgtagagctccccggtctcgggctgcgtctcccctccagcgctctcctgcctgtgcgctccgacgcggcagcggcggtggcgctgagcgctcctcggtggggacgcggtgctcaagctgggagcagcgagaaccctttgcggaggcttcccgtgcccgctggacttaggatgccagggcgtttgatttgcacctactgagcccggagttcctccccggccctgggaagggcttgcagcggcggcggcggcggcggcagcggcagtagcagacggaacagcaggctctcctctccgagggggggcgtcgaagcgcccgcgccgggctcccgccctcaccctccggcgctcctgcggccccaagccaccacctcgtagcccgcctccttcctcttctcgccgcgagccccaggcccggacgcctctaggatcggacccgcgcgccccggatgcttggggctgccccggcgcgcccccctacaggcgcgacccgctgagtgacccggagggggcccgagctcgccccaggaggggcccccggcctcgggaccccgcgccggacctgctggggagccgacgatgtccgcgcagtcccaggcattgacgcgctcgacgcagcccagggaaggcggccggccgctgcccgccgagccctaggcgcacaaagcccgcgcccgccgcccggccccggcgcccgccgacgactttgccgcctgctccgcggctctttgtctccacttggggcgggcgcccgactctgggatttcgctgcgagaacgagctgggggggccgggggcgagctctcggtttcccggccgccccccgctcgggctcggctcccccctcccccgcacctccccggcccgggctctcggcgcttccacgctctcggaatcacgacccctccctgccatgtatccgcagggcagacatccggtgagtaattgcaactcggtttatttaagcatctatcatggcagggtaaacgaggcagtttatctggcacctccattttgcttgttgctacctttatggtgtgtgtgtttgtgtgtgtgctctcacacaaagggggatgcggccggggggcgccgttgagagaggaggttaattccgcgcgagtggcgcggggggctgcttgtgttccagggggagctgttcacgcggtccccggccccgctctgaagtctcccaactcacccggcttgtctcccgcccccgccttactggggagagggaggcccttggtgaaaggcatgggagccccgctgccgacggggagagatggggcgccccccctccgccccgtcggagagctgagaaacttgctgggaaggttctgggctgagggtggcctcttttggttgggcgccgttggggaggggccggggccgctctgagcgcggtctcatgcccccgccccctcccctgtcttgtcttcgcgggctccaggctccccatcaacccgggcagccgggatttaaattcacggtggctgagtcttgtgacaggatcaaagacgaattccagttcctgcaagctcagtatcacaggtaaggccggtgggggccgccccggggctggcggggaggggtgggtccctgcgcggctcctgccatcccccgcggggacggagggggctcccgacctaggggcggcggggcagcccgggcctccgccttttgtttcccctttccgagcgcgccgccttaaccctttactgcccgcagcagcccggctcccagcgccgcccgtggggtccccgaatgagggtctaggtcgcggcgagcgggttcactccgggttctgggtgtcgggagccagcgtcagggtcctactcccctgctgccgtgataagtcctttggctcgcgggaagtttcgaattgtttcacatccccctccccacggcggggacccaaatccccccgcgtccccaggctgtgggataatgggggcgcccccgggggggtgtcaggaaagtggaaaagtggctctagaggcccttgggtcggggcctcagaggaggctgtccaggcgccacgcctgagccggctcctcctgccctcgcagcctcaaagtggagtacgacaagctggcaaacgagaagacggagatgcagcgccattatgtgatggtgagatgcggccgcgggcctggggggcggttggggcgccgaccccggccgggggcgcggcgtggatctggggagatgagcgccaggtccccaccaccgcccagccgcagggcggccctgagagagggcataatctggtcttgccctccccttccccagcttccattgccggggccacttggaggagggtgagtgaggggaggggcagaaagagaaaccccgattccaggccggagacttctgtactatctttatgtgcctttaatttgtgttttgaaagtttcccaggggctgattgccattgccctatcttggctagtaagataggattggaccagcccatgtgaaattagggttggtaaaaatctctcttagtgacctcctgggagtgtttggaaacttttctgctttgcagctgggatctagccagagtaggacagaagccctccttccccagggtgttgtgaggagtggagaggccttgtaaagctctctctgcctccactcccctcctcagggatcccccagctgggtatcttctccacgctggggcagtaggcagactgtcttccttttgcccagcaagttttaatcttcatttgtgagagggcacggctccctgcactgctttccacataagaggccttcgacacagtgctaaataactctcagaggacaagagggtcccagtgtacacacgattccctgttgaacctgaaccttgtataaacaggatatagggcacatgtggtgcttgtgggagggaaggcccagctccccttactaccacataatataacgttctgttgagatgagaggaacgctcgcccttgtcagctcttaaaccgctctgtaagctggctttggggtttgatttaaacttctttagcaaatgtatcgtaaaagtatgatttggccaaaacctttccaagaaaaaactgattttgaaaaatgaccagatttctgtgttgtctgttaatagccattctttttacttttagtactatgagatgtcctatggcttgaacattgaaatgcacaagcaggtaagtgcttttctcttttaaaaatatatttcattttttaaaaacttatatatgtggacttcttatgttctctcttgtttgaaagtgagcctgcttcttcgattcctcccccttctccttgaagagtgaatggatccagtccttgaaatgcaaggtctgaggctttgctgatttttttttagacatgttgagcttttagcatttgagcttgtgaaattagtcctggtcttggatctcggtggaggataaaggaccaaagggaaagttgtacctccaggatctgctttacaaactcctgaaagcccagaggtggctggctgcttttatctgttttaatgtaaaattctcaagaggaaatgcaggaggattttttttttctttctccttttttttttctttttgcagaaatgtgatgttctgccttgataagattaaacttcaagaaccttaaaagccaggctgagctgtcgaaatttaagggaacgaagccactaactgcttaaaaatatgaagccagaatgaaatacaacttcagtgccttgcattgacaaggtggctttctcatccctgtcttgatttgaaggcagccgagttcccattttacagagaaggaagctgaagctcctgggtgaagtaacttgcccaggggcagcctagccaggactttcgagatggctgggggttgagctcagctttgaaatcctgaagtcaaaccagtttagctagtgtggtgtcgtttgatggatatgtaaactacctggtattgtcactcttctaataacagtatacctcaaaccgagcaaatacaaacaccctttatctcagtgcatatcagtaactagtcccagtgctaggctgggctgtgggagaggcctgtttgtgtatttgtgttctgaggaaaggctgcctataatttggcttggccaacgtttagagttgacttggcacgtataaatggagcaggcaggccggttgttctttttaacaattggtgttcatgaaatctcagaaggctgttgactcattctagcctttggtgaccgtgacttgaatggattttctgctctaaattaacagtcgtttacaaggtttcaattttgctctttaaggaggcaggacccagggcaggtgagaagggcaggtgaccctggaaagtgggcagattcctacccactcgggtggcttcctatagagcctttgggatctgtagtttcctttcccctcctggagggagcccccagtgttgggtgaagggaagccagaaaggggcctgagtttattgagcaatgtgtgggaagccagcttgtggcttcctgagggattagttagtcccttaggaaggcacatgaaggctaccatgtttttacttcttgacacacagaaataatagacagggctttatacgtaaagatatttctccttggaaaaatagaatagagacaggttctgcaactggaaggggccaggtcccggaagaatgcttgaaatggaactgggggcccaggtgtttcaaggaccttggggtgtatgcagggtgccacttcctccctttgtctgccctgtcttaattttttttttctcaaatagtatcttgggtgtgtttaaagagggtaattgcacccaggtttaaaatttatagcagcagttattggaagagcttggtaattaaggtgtaatgtctcgttgcatgttgaggtctgcatgggtggtgttccgcatgtctgtgaatgaatggtgctttggcactaagaatccaccttggctcgcagcagatctgttctgtgagtcctggggatgctgtgaacgcaggaagagttaaatatcttaacgcatttggtggtggggtttatataaagagcagctgtgtacatctgggatttctggccattccccaaacaaggttcttaaggggagaatgcctggggtttggctacgttgtctcatttaatcctctcagctgccagtggtggatagaggcattctttgccccctgtttataggtgaggaaactgaggcttcagggaggccaggagggcagagctgggattcaaatccagccctctggcttccccactgggcactttaccttgcttgccactcacctttgccctctagcctgagttcccagcctgaacatgtgtgctctgaatgcagtggctttgcaagcttatggcagtctctgagttgggtgaaatcaccctgtggctgtggaggaacaaagaggcaaggaggtgaagaaacctgtgccgtgaaatgcaaccctgatctaatggagctggccactccctaggtttgcaagggttctgtagaagaaagccctgccactaattgtagtgtgggtcttgggtgcatttggcgaatggtggttaggcctgagcaaacaagtttatcagctgacctgtttagcggttgactggtgttttatcggcacacacaatcaagtgactggagtgcttgaattattcatgcagtgtcctgccctctagacttgactgttcgtgtgattacatctgcctggaacaaacaggctggattcttcatctttaagctggggtgggggtggggactgtctgtacttttatataatagatgatctatagagctagcaccttgggaagtgtggcagtcctcagcctgcgcgcatacacgcacacgcactccaccatcaccaccacatattttttttaaaagctctcctttgctggctctatgggaaatgccaattagctgggaacctcgagtcctgccagatgggcccgggtattgacagagggcagctgatgaggtgcgtccagcccatttttattttactgagaggttaaactcactgtggctggctccttctctggctgtttctctgtctctctctttttccaagctgtcaaaatcccagagaagtaataaatggtttctcctcctgctcttctgcctccctccctaattatggtaaagcaaagattacagaatcacaggcctggcccgggacttcaagaggtcacccacctccaccaagccccctgcttccaggcagaatgtcaagggtggttcagagagtctgggaaggcagtgatgactgaccggctcatcacttgccatcttgtttgtgcagaggctttccagtgtcagccacaaataacaaagccagcttaaaaccaggggccccagagcaattgccatgcattggatttgaggcactggctctctgagaagctgggtcaggcagccttttcacccactgttggtgagcactgacatttttgaaagtggacttgagccattttgattttggggcagtgtcgtgccgacacaatacagtcacctttttctgtgaactgaacaacctttcctgtaagtttctctttgaatcttggaactggaagagccctttggcttctcatgcaaacttttcaagttacagatgaggaaacggtggcccagagaagggaagcttatgtactcagtcatacagtcccacgttagtggtaaagctgctactgctgcttcccttccaacccaggactcttttctgtaagactcaagaaatgaagagtgctccttttctagtgtattctgtgtctttaattactattgcttctttctgtgttattatccaaacaggctaaggctacaaaactggccccaccaaagtccaaagtgccccatttcgggttgtataatcatatcactgaacccttattgtccacagtcctgttttgaattgccagctatttgcacaactaatgatttgatgtgtgtaataataatacataatgcataactagcaatcccagaggaaagattcacagaccgggaaaggtggtatatataacctgtgaactttttaccctagccatggggtgccataaacacagggctgaggtaggaaatggaaaatccccatttgtcactcccctcccctccccgctctggatcttctcatctaaatgataaggggctcacctggaagatcttgaggcacacagaagttttgtgaccacggtgaaggtgcaaggtacaggtggccagagggagctaccaggcaatgaggttacaaaggactctgccaaggagttgagcctatcttgataggagaatgtgggaccacttgcaaagtagaaggggtcaaaggtccttagactagggaagtgcctatttgtgtggcatctgagttgagctgtgaaattttttttttcttttttgccagagtgctagcatccaagaaccctcccacccggccccatgccctggtatctgtcttgacttttcctgctatattgatcttccctggaacagactgtaatcacgagtcctctcactgagtgggtgcctgcctcgctcagctttggggtctgctgggctccaagctccctgcatgctgtctagctagagggaggttgccccacccctcaagactgcctttggaccccttttctctagttgccagtgggagtggtagagtgggggtttcagtgcttttggggtcttttccttcttgtgcatttgtcattgaaatgaccctgggagatgagcaaatggccccttgtccttactttacagatcaacgggtgggaacctggctcctaattcgggactcattctctgaactctcttggaccaggagcccgtggcagacacggagttcttcctttccttgaactcctccttcccacctaggctgtttgtttccattttgttgaaggagtgagtcagtcaaggaataaatctccttttgctttctacgtgggagaatgtcattctgtctcattgtttgtacaaaatactgggacaccaggggcaaaaacgtgacaaagacctaagcttggcagtgttttcccctgtgatctggcactcattcctcatctcatttttgtaggtatgaaggaagcccctctgctgaggtctctatagcacttagtatgtaataggtgctcagtaaacatcttggtttttcttcaaaatttactcaggttatctgagagtagagttccgattccctgagccctgtgagtaggaagtggggattttagttgtgggctggccgcccgctctgcaggcttcctcctatggcccagcatccagtttcttcatcagtgaaatgagggggttggattcattcccaaagcagttattaggggactgggatgtgctgggtgtgggctggggttggttacacagccgaataagacaccattccctctgcgggggagtcggatgtctaaagaagtaattgcaatgcagtgaggtaagtgctaatgtggcccaagtgtcataggaggagcacccagcacagaacagcttattcttcttgggtgagagcagacttcactgagggctttgcttggcgcgagtctgaaagggagggtagggtttatgaggcagaagtcggcagccgaggcccctccagggtggcaacagctcgcggcaaggcagtgagatatgttctagaagccacacgtcttcggaatgatgtggggcggggactgcacttgggaagtgaggcgaggtggtgacattttgcagcagagcgatctccaaggcccctctgcccttgcagtcgcggctccccacccggtggctccctgcatccctgcatggctggctctccagggctggcctgagtccatctgccgcggggtgggggtgggggcgggggcgggggcccgctctgggccgtttgtggcctgctctgcctgctttcctaccgtaatatgctgctttgaactttattccccaaagtggcattgtctcctttctcatattggtaattctgtaatgactggttatgacccgccccctcccccatatttaattctcatcagcccagctctccactttgctattaatgatagcagccagcaaaatagctttcaacatgccattgacagtctggtttaagagagcacttgaagtagtgctagacagctgaaagcacccataattgtgtaccagagtgagaactgcgtgctcaagggccttgtttttatatgcttaaagggacaatatcttgttttcaacaaatgctctctgagactcacagccaagatgctttcttcctttttccttttcctttcttcttttggctttctcttctccttcaaaatacatatttaaaaaaaattctttataaaataattgttcccttcaagttggggttaaggagaaacttaaggaagggggaaacgtcctgccgccatgtaagcggggaatatttggtgggtttgttgttttgaagcatcgtcctttgcaggcagcaagctgtgggtcagccttgccctactgagggtccttaggaccttgcgtttctcaaggaggtaatgggagagtctgaattcgcatcagcattgattttgaattcttttctttgctaaggatgttgcacaatcggtgggctgcagagctgtcactgtgaatgtttaggcagaggccaccttttgggggagggctggaggagaggggtcaccgtgttggagagtcaggccatgaccgctaaggaatcagattctaggaggctgtttgctgcagagttgatggcccaagaggcccgtctggaaatcaacagggtgggtggggcaaggacttgtattcttaagtacaggttcacaccaggcttggagggttaaccagggggcccggctagtccacccggcagattttatctgagaacaaatacttttctccccttcacaccagccgacttcattattgctttgaaaatgcagtcctttggaagaggtttcctttgcctctctgtcaccaaagcctcccattgccaatgtgtcctgtgaagggagaagagagaagcaacttcccatctgtggggcctgagaggccagggaaaccctgttggggcctggagtatatgtcgtcatgttctctcccaggctggctgctcttggtaaagggtaggagcatggatgggcttggctcgtgtgtcttaggtggttccttccatcacccactgtgtgaaggataggatccagtgttctggctgctgccaccaccaaataatcccaggggaagtactttccagaggacaaactgtttgaaaaatttgatcttccagatattatagattataatgctacggcctcttagaatttctgtagcacttgattgcaaagcagattcgacattttcatcttagcagctaaaataatgggtatttgggtccaggacagacagacaccaggataaaagcatcagagcataccctgaaagcttggggtgtgaagatgacctgtgtactagagggctgtgttctcaaattggggttggggaggtgaggcctgtgctgtgacaggactgtgagttccgtgagggacaggaccattttgtatttgttttcactaagggtcctgaaccctgagcagtgcctggcccatactggatacacagtgtgcattttgtggggactcaaggaaggaaggtaatattccagctcagggttctctctgaccctgaatagtgttatggactctttgggaaggatagaagctttcttagttttctgacagaggcctgtaggctgcaaacgttgtgtttgtagaaagagttgtaaaggtgtcatgagcctttatttaaaagtgtctttaatgtatcttaggcatctttttcttttcatctcacactatggacagtttaagtgcaaaaggggaagaaggcagggtgggggtgcgaagagataactgggaggaagagatgacaaagcagagatgcggaagagacaagtgctgagtgggtgaattggtaaactcggcttgccatgccttggctgtttgggcatggagttccaagtgttgtggccttatctcatgagccttttaagtttgactattgttcacagttcttctactgctttttttgtttgttaattttgaatgaaaactaccgcaggccgatagaagtttctttttcgtttgcgctggaaggctgaccctttcctcaagtggagacccaaatgcagaagagctcttcccactagtgttttagcactgaataccaaatgcaatttgggtacaggagagggctctcccttcctggtcagccatgaagacttgaggtttagactccaccaccctgccagctatatgaccaaaaggttggaggaggcggcctttcacccacttcccaaatctttcccttgggctagccctcgacaggtctttgctgagtttggatctgaaactgattaattctgataatactggcaggggcatgctttggaaccggtgatgctttgtgatttctgctggggaaaatgagaagaggaaggcagttcagtgcagactagtggacaagggatgggagtccattctagctctctggtgggggtgaggtacaagaacttctattaaccttcctggcctctgtccaggaagaagtaggacactcagagggctcagaagcagcaggtgatgccagatggtctggagtgagggtctaactggtcgggtgggatagaggaaggaggagcaggggagacagaggaagtgagcctgttggcactgattggtcaataggtcttcagctcatccttaaacccttacctgcttcttttcctagaaggaggccccttcctctgatctctctctccagtgaagaaagctgaagtccagttcttattttgctttgcctaacaacagaagtcctggggaaagacaggaagaattgagattgatggtacaatccctgtctcccatccctcaatcgctgggttttcatactttatcccagagaaatgggggatctccatgaagccagacttgaaatgggggagaagcagcctggtttagagctcgaaagacatgcccctctcctgcagggtcctgctgctgttggcctggtgtcggtctccatgtcacccagtccttgtgtgtggcaggcacccacaggcctggtctgcaggaacttgagaagtgtctagatacccctttctcttagccttttgggttttctcactattcttttacctggttttttaccttacttctcaagagacccctacccagctcttcctcactatccatttgcccagggatattgggcaaactccctttttaaactcccaggatgttgaatgcccattgggcctactggatgatggatggggtgggttcccagcaagccagtttttcttggccagtggattccctttctccctcagaagatcacaagttcttgccgggtgatcctggagagttaggtatagagcaccagaagctgggagatttgtcttcatggctaagaggttggctttggagtcagacaaatgtgggtttgagtcccagatcagttcatgttggtgtgtgactttgagcagactgtttgacctctgtgatcttcagtttgcagtggagataataataacacctgcctgttgcggcagtgctgtccagtagaactttcttcagtgatggaaatgctgtatgtctgcactcttcagtaaggcagccaccagccacgtgtggctcttaagcacttgaaatatggctactgcgactgaggaactgagtttgaaatttaattttaattaaatttagctagccacgggtggctggtggcttcataaattgtacagttacagttatagggagtgccatgaaggatgcatatagcctgcttagcacaaaaccttgcacatggaaaggccgaagcaaggtattctcacaaggggacagagtccccaaattgtcaaggcctccgacatagaggacaagatccttggtgttgcatatgttgtaagatttctcagagccctttcccatatgtgacttgttggctctacggtcctgcagtgtaggcaccgtgggcgccacgcatcagatagcagcactgacggttaaagaggttgagtaacttgctcattgttgcacagcagaccagtggccaattcagaactggaaaccaggcctgcttccctcgtggacctcagtgatctttatccataggctatatcaagatgaggtcttctgtggtcttcccacatgtctacccccagaccaccatactacaggcatcagttccagtgctgggaagaaaccagatgaaacctttcagaattcagtaaaacatgagcatcagccacatgtggatcagggattgccaccctgggcgctgtttacatttgggactggataattttttgtggtgggattgtcctctgtgtttaggatgtttaacagcatttctaatctctacccactagttgttgttatcagtgcccaagttgtaacatccaaaaatgtctctagacattgccagaatcccttgggggaaacaattactattggttgagaggccttgttatagaggaaggagtctggctctaacctgggagatttgcttaccacctggtcttcctgtgtggtcttcctgtgtgacagcttcttgccctctctgggcctcatttgactcatctgtaaaatgagaggtcaaatggtgtggcttgggaggaggtcagtttgagaaggagcatatcatataaaataagtttctaaatgaccgatcttgatttttatagcctaagaaatgccatcactcctgccttccttatttggagaaagaagaccctctaaccctttttattttaatttacggaacaggtatgctctttggttgtgaataagatggtaggtagatagaatggggctctgtctctgcccctcaccttgttcttccctcatgccacttgggttttccaaagagtccctgcccttaagaagtcctagccagcatttcatttgtagtgctgacctgatggggggagacccccaaaatttaatgagctgtctctgcaagggtaatgtgacttttacagcctgttgaggggcaaggggagatttgcataatgttccaagggggattaggtggctgggggttgccatggcaacccccacagggatgaattgagaatttttcctcctggcaggagttggccaatggagtctgggaaggtgggggagggggcagggggttatctgaggggagggaggagggggaaggagagagggaagggtgggggcggtgtgcctgggatgaatgggcagtgttgggggaaggtataatctgaaaaagcactccctgttctgtctgtacaagcaagctctttgagagccatctccccccacaagtaggggtgggaggcaagcagagtttagtgtgtttgggaaccaagaaattaaagtgaacaaatatttaaagattattggatcttgttaacaggaagcccggtagatggaaactgaaagtctgaggaatgaaactctttagagtcctaaagccaggagggacttgagctgtcatctgggccctgtggtgtctgcctccaagtctctgttgggtctccatggaatgctcccaagggcagggcactcacacagcacctaattcatttttgagagctccgattattacactggactcagattggacttctttattcggaaactgaggcccaagtgcaggatggatctgggctaggaatgcaggactctagactgtatgttgctacctgtttctggggttgggttgcctggatgcatgctagcttggcctaaccatccccagttcccttacactgtagacccctggaagaaaagaggaggtgggattcctttcagggaagtgtgcagaagggtcgtcccaaccccagcaaccccagagtcccttgccgttgatcggtcctagctggggaagggtgagtgtgtttcctcctccctgccctggctcctcactgtcatcctcacccgcctgtgaagggtacaggggctggtgcccagagtgtcctcacaggccggctcaggccagcatccccttcccttccggaggagacagatcctcagggtcacgctgaggggggctgggcctttcttgtaccaagtcctcccagcataaagaattcagcaggcttcctcggagggcataaatatttaatggcgttgtagttatatataatttgatcaatatgtcagtgctaaaagggcctttaagaaggctcacctgtcattgagtgatctgtgatgtgaaccttcaccagcccctccagtagcgggaggggctacatttcccaaggctgctgcatagatcatttgttgaccctcctccccttcttacattgtagcactgcttcccctcagagcccatggcgtggatggagcagggcctgagaaccccaccccagcttttgttggctgtcccccggcccccccatggatttcttcctctgttgataaaacacccacttgttttatttcagtgttctctgagctcggcctaaggagaaactacctggcaaggactatcctcttttagtcacatcattgagaggctatccatttagtattgcctaggaaatgcaatgggatattttaagttaaaattgcccagacgtggtattctgaatctgggtgattggcgcctggctgctgggaggctgctgggaaggttggggccagggccacctctttctgcacagcctcccaccccagcctttccctgcagctctgggatttaaatcaagatgaagcagactctcttcaaactccaaggactcagtcagagaagtaggtaaaacctgattaaaatttaagaacctcagagctgactgagatgacacccccaaacacacacattttctagaggagtaacctgagacccagaggcctgctgggatgaaaatcgtcacttccccatggctttgcaatgtaattcacctttcaaatgggcaggtcccttcctcatctcatctttcacacacatccgcaaactggtctcagactcacagtaccatgctctttgcatgacactgccctgattttccgaagaagaaatcctcatttcacaaatgtaactagaagcctagtagcatgggatggccgcttgcctgtctcacagacgtggaattacttcccgctgaatgcaacaacttggagaaccctggcctggttgtcttagcctcaccaaccagtcttcccttttgaatcacagaaactgcacagtaggggcttgacacttagaagtatgatatcattgttcttgcctagaggctcttccacagtgaagcgcagttttgctgatggacagatttgaatggctcgtgctctgaagactggtccttgggacccagcccaggtcagccagctgcccagcaaccagccagcatccatccacatctcaaggtggcttggctcttctctgctggtcttttgtaaattcatgtgatgctctgttttatggaggaaatgataagctgcacgccaattcgggaatatttagggttctaaaactctaaattagggctcctggatcttatacgttatctagttaatcccttcattttgcagacaacgaaattaatgcctagagaagggaagtgatttgcccaaagccacacaactaaatggaggcagaattggaggtagaagccagctcatctctgcgtggcgttggagcataacacactctttgaaggggcagttttctcttctccttgcctttatttggctgaggttaaaaggaattgtgcattcagagtccacaggtacacacgacagggcagtttaaaactaactagcagacagactctctggtggaagtagctctcgacggtgtgttggacacagtcacctaaattaaaaataagggcaaggactggctgggtgctgcaagcccaggagcaggaggttgctggggggtacagatcaagagcaggctccgtttcccttaatttagtgtcttgggtcaagggccaaggatagtctgaagtagcagcaaacgtgaatactagactgtggttagagaaatagacttttagaatgctcaagtaccctcggtttacagcaagatgttcagaggtcctgctttaatgaggagatgatcatgcaaatgggagctactaaggcgcatggaacagattgctgtttgggaaattacacttgccccccactatcttgttttctgtcatttatttgcctaacaatcttgacagagatgcagggcagatgttactcccagcgcccagttggtagtgcagattccggatgtagcaggacctctgtccccatttctctgaactgcttctctgtctgtatctagtagattagttccttctgaggaacaatgtttttccaccaacaaagcgcctgctttgaaccatacttgaaaagaaactttcaaaggcggcaccagcctccctgaacaccttttccaaagtgctttccaaagggagccatcttcccacctcccaccacctctcagattcgcttctgaagacctggctcaaaagcagtggctttgtgggaccgagatggagggaaggatggaggtcggcctctggaaactacagccgccttatcgataacggattgcgccaagttgccaaaaggagttttccaacatacgatcgagttccagtttgtgatttgtgacctgtcccaattgttgaagtcacacttgattttttttttttttttccttttttggaactgatgtttagagcttgtttgagttggatccaatgctgttttaacagctgttctaatcagaagtgctgtcaattattaaccttaatggtggtttttctttcaaaaatatttctctaagctctcttgaaatgtcaaaatttggcttcttggtaggaagtcatttagtgaaatcacttaatggctgggcatcagtttccccatctgaaaagtggagatgttgacaagcgccttctccgcggggttattgtggatgcacacatggcgagttgggtgggtgatatcagcggtcattactgttgttaggagggcttctgttaagccagctttccatttccaggaacttcccctcccccaagcgccaccctccaaaaaataaacatttctttaaaatgttgagcgaacagctttcctgttcatgctttgactctgcagagtgcacgcagcccattctcagggttgggcagcctttgtagagatgggggaggcccaatccctgcttccactttgtggggagaccccaagagggtactagcagatgatggcacagtgacagctgggagggatgggatgtgcttgcttcatgtccctttcccaaggggggacaggagagccaacctccaaggctccttcctcagtgcaagatcagatgccagggcttgtcagacggagggtccgctaacaacaatcttgggtacaacagagagtgaaacgaagatttttccctgacaggtgtgggggccagtgggcaaggccccacctgacccccgtccctatcacagctcatcacctctgnnnnnnnnnnnnnnnnnnnncctttgtgctgcctcaaccctacacagtcctgtctggtgacgtgccaaagtccttcctgccttgcagagaggcctctcttcgtcgaacatgggcctcaggaaagacagcctgaatgccactaccccaggcttgtggaaggttctgcatctgtgtggcattgttgcgatagccctcagttgatgcttgtttgtggtgttgggaggcaggaactactttaggagggtggaggggtgagaatgagagaggacttgccctgagccacccagctgtggtcacctgatggcccggatggctacataaatcctgggagatccgttgtcctcataaccagagtgagctgggctccagaccagccctatgggaagatcctgtctgtgggaagcctttggccacgtgtttgctgaagggtgtggggaagggcaaggtcagctacgtttcttttttgtcaactcccgagaccctgacccttggcctgtttaccagtggaaggaggccatagccagaacccttttataatcaccctgcctccctgctctcccagagactgtgagagttaatagttgctgaggaggccagaatgactggggatgttctgaccttgcccctgccttcctggctgtggggaggagtagtggccagggacccatctaggtggcttgcgattggcctggcttggaggtgccaccccaccccgttggtgaagggcttgggccactggccaccaagtgtatgtcaacactccatccaccacggcccctcccacagatgctgcccatgctggggcaggcccagatccacagcaaggggtcactgcaatatgaagtctcaataaatgcagagatgccagtgatactattctttgggccaaacatttacggagcagctactgtgtgccagacactgctctattgttgtttaagataacaggccttggacctgtgagcttcctaaacagtaaggttggttttttttgtttatttttgtttgctttttgttttttacatatctttctattcttatttggtgcatgaactcaaaggtgagagaacttgttactctgccggtttggagtgagctgcagcctatgcttgtttctagaactcctgccctatccaacccggacttttttgcttcattccccattcctactatcagttgatttaggcgaggaaaaaataagcagagtgaggaaggaccctgtttgggagagctcttcccacttaactagattaacaatttatataatgattatttagtaatcctcctgggttccttagagtatgaatgacgggtgtctagtgggtggagaggccagggatgcttttaaaagccctgcagtgcacagaacgggctccacacagcagtgaattatctgacctcagatgtcaatagcatggtgtttgagaaaccctgatgtatggtgtcctggctagagtgccccacacatgtgtcaatgtggagtcccagtgggtctgagctgggcagtttggaagtgggggccattgttgacacagttggcctgggatatgagcgacagtcctttataacaggaattgtctctccccaaatgccaacagtggtgctggctgggaaacactgactctgttcctgaggagctagagtgttctaggcagaaagctgacagcagtgattcctgatcctctccctgccaggaacccccactgtagcggacaggctccgtaggttggcgagccctgccaccgtggctggcagcccaggacacaggcctgcaaaaacccataaggctctttagttgatggcctgcctttccacaaaccagaggcgtcctctttagtggccaagggtggagggggtggagggtgttagcccaaggaattctcccgaggtccagggtctatttatgcgccttcagattgtttttattttaagtgcacaaggatttctcatccagaatcatttgacatgcagatgatcacagatttttaaaggctgttgtcatggttttgtctctgaaagattgctatgtgctgatgaaagctttgaagccagctttgggacctcagtcctggcgggctcaggattcagaatgagataagaaaagcaattctgagagtcgtctgtcagtggttctaggcctttctatctggactcagttaacccgtatagcaccactcttgatctgagatctaaagtttacataggatgctggtggaaactgttgactttctaaatgcagtcttttctagggtgttgggagatgaggcagagaattgatctacctttctaagattgacttctgtgagggattagggatctaatgaattacatctctgagcagcttcttagacaaggcaatgctatatcctaaaaaatgaagtgttggctgggcatggtggctcctgtctgtagtcccagccctttgggaggccaaggtgggcagatcacttgagcccaggagtttgaaaccagcctggacaacgtggcgaaacccagtctctacaaaaatacaaaaattagctgggagtggcagtgcacctatagtcacagatatttgggaggctgaggcaggagaatcacctgagcccaggaagtcgaggctgcagtgagccaaaatcataccactgtacaccagcctgggtgacagtgagaccctgtcttaatgggaaagaaaaaaaaagaaagaaggcttaatggtaggattttagcctggtagcatatatgtgggggagggattgatcttggtgagggagaggctagtcccagggaaccctttgccacataggaccgcttatcagcttagtcccatttatctgagagctcatgtcctattggcactgggcaccagtgggcagagcaattcctctctcactaaactgtgtttcactcttacagtgggttttgctgggttgttgggggtgatttttatttcgttttgctttaattagggattccatccagaggatgcaaactatattctgaaccagacatgtagactacctctgatggaaattggagctccctaaaatgtaggcagcctggctgcaagggagttgaaagagatttcttcatgctgtggatttagctagagcctcctggtaggaggctgactgagggcagaaaggatggagccccgtggagaggggctgtggtctggggggagtttgcatttccacttgcctatgacatttcagtgacttgatttatttgcctgagcttcatgtggtctccttgcctttgcagacagagattgcgaagagactgaacacaattttagcacagatcatgcctttcctgtcacaagaggtaagaccttcttttattatttcttccttttctttccaaatcagcccagtggctggtggggtctcactggagcctgagccccagccccagccccagcctcagcccctgtccattcatactgactgagctgacaacctggagatttccagagccttctccggccagtctggaggcagggggccatatcagagggaccatttgctccttcttctcatagaattgtttctctgccatcacctgagtccagagattggagtgctggcatgcgacctaaccatcagtgggcagtgggtgcctctttcccatccaaactagcatccccagcccaaagtggacctcagttcctggtacagagtgcccttgctgggagcatgacccaggtggtcatgtcactttctacgcctaccttccaagggacctccatttgggacagcggctggactagtgggtgatttgagataaatgcctgcaaagaagccccctggtgccgaccagacagacgggccgactttagtgggctctgtttctgtcctctgatttcactccagccagggcaggccctgccctctactcccactcagtggctgggaccatgtcagctccctcagggactcctaatggtgacctgagtaaatgattgaattaatatataagaatcagatatggcaatgccctcggagcttgcagcccagtaggagagaaagctgtgtatgtggctggtactacctcaaggccaaagggaattaatgcaaccactttttaaaatagactttatttttttaagagcagttttaggttcacagagatttcccatatcctccccactatcaacatcctcaccagagtggtacatttgttgaaactgatgaatctacattgacacatcatcacccaaagtccgtagtttacattagggttcattttaccactttttctttctctatctgttcatctggaaacatactttgttttctctctatttagacaggtatggataaggtatatgtagacatactttttccccaaatcctttgacggtaaattgcagatatcctgacaattcaccactaactactataactgcatctcctaaaaacggataccatccttcatgattacagtattgttaccatgtttagagaattaataatcatcctgtaatatcatctgatatccagctcatacgcaaattgcatggaaaaatttgtgtgtgtgtggttgactaatagccatcttttggcatgctctttgttttagaacttaaaaggaagtttcaattacaaaactaatacatgctcattgaaaaaggtctaaaagagaaagtaaaatcgcctgtcaccctcccccctacttgtgccctgtgcctgttcagtgggactcctctgtctgctctgggcctctccgagaggccctgccagtgctgcacagcctgtgacctcctctgtccaggaaagtggctgcatctaacgcacaccctcttccctccagcaccagcagcaggtggcgcaggcagtggagcgcgccaagcaggtcaccatgacggagctgaacgccatcatcggggtacgtggactccccaatctgcctcttaccgtgtgtatagcccttttattcctctcatttatcataaccagagattgaccctgaccttagctggcctcaaagaatggcggccccagggctccggcttctacaagcaccccaagggcttggacccatgtagggctgtttcccccttggctcccagttgcctcctagtcctcaaactaaaggggagccagacacgcctcaaatccacctcttcagccatctgcctcatcttccactggcttttggtgtccttgccattgaggagggtgggggcctagggtcaccttcaaggccaggccagctggccagtacctggccacctcctcacacttaccccggggcctgtctgcctcctccctggcagaagtctgcccttctttggccacctgggatcagaacagtctctgctgtactgttgatgtgcatcgtgctgtggaatttgggtttacgtcttgctgtcccatgcgcgaagctgcctggctgagcattcatcatgtacgcttgtgaactccagctggggagctgagactggttttcctgactttctagaagtcccgtctcccctttacacaggaagacatacccaagagtgctctgtgaggcccacttccggactggccccttagtggaaaagggaagctgggtctacctggcttgtatctttaatgcatttcttaggttcaagtggcatctttctcctgcttgctgctttggtgtgaggctagtgacatttaagataagcacctgaggaagaagagtctttttagtgtgactttgggcaaggctcttacccttggggtgtacctgtccacctttcatctctgaaatgaagagggtggacaggatcactgcttcccagtccacggaggagcttctggacggtacagatacaggggcacttgccccagaggtcttttccataggtctggggatgggactggaaatctgtgttcctaacgatttctagatcattctgaagtgtagttaggcttgggaagcagtagactgattcaactctaacattctgggaacctggttggtcttctttcctctttctgttctcgtgggaagtcactatttcaaggtggaactgaaggccccacaattttcctctgcttggtaggatacatgatgactcttgacttttccgcctggggcagagacctggaggtctgtgttttagtcatggttctcccccgatgtgacctttggcaagtcccttctcttccttgggcctcagtttctgtatctgtaaagggagaacgtacaccggctcatctctttgggcactcctgactcctaccaggaatgctgggaggctggaatcacagaatgacacttatggacaccggcccttccatcacactgtcaggacccgtgatggttgcagagtcctttgatgaaggcagcacagtgggtttgtccttctgggctgagcccatagggacacttctcagtgctgcttgggcaggtgggggatgcaagcattggcctggtttgaatcctggcctactgtgtggaatgggcagagaggagtcttgaaactggaacgtgaagaagtgttcagtgctggaaggcagcaccccaagaggggaaatcatgatattttaatgtttaaagtatcatcagagatcatctagcccggggatcgtcaaccttgacactgttgaaatttggggccagatcattctttgccatcctgtgcattgtgggatgttcagcagcatccttggcctgtagccactagatgtcaataacaccctgacaccctgatattcataggaggcaaaatggcccttggttaagaacctctgatctagctcaatgcccttgttttacagagaggggaagtgattatgatgtttaggaggaaagccaggccagaggcccaggtggctgactcgcagcccagggctcttcccctggccctggtgcagccctggagggtggcctgtgtcatctgtctcagtgaccagctctcagcttggtggtggttctgctagtggtagcagggggctgcagggttgggacataccttgtgaattctgttttccgacatttctcctcttccagctcctcaccccatcccctttcaaccatcttcttgaggtttccaggccaactcctcctacccctgcggtggccacagcagggtcccctctcaccctctgcccccctctttggaattaaaatcctcttatgaaaataattttttttaagttttaagaaaggagtaaaactgggggagaagcactgcttggattagctgtatttcccttaagtagtattcaggaagctacaagttaggtcgaggcagctcgaggcagacattggaattcaattaaagccaacgagtggggcctgtgacccccattttcaaggtaattgcttctccagctccaagtgaatgcagccatcgccctgtcattaagcaggcagccgtctaatcgctgcgcctgacagagcctcacaaggcaggaattacggacagccgagtcgtgctcgcactggggagccgtgcttgactgcactcccgcgaaggagtccgctaatctagtcagggcgttctttatctcctcctcgaggagagcagagagcgagcctgcagctgagctgcctctgggaagcaaggtgaagaaggataacggggtgcagagccatgggctgagcaaaagggcaggcatcctggccccagcaggaaagggcaggagagagagggtcccaagaggctcttggcagctttcagtggctacccccactgcactgttggatttgctgctctggaaggagacacagcctggcatcctggtcttggacttagaggagggctttgggcaagtcactttgttcctccaggcctcagtttctccatctgccctaattgtttagtggctctcttgctcattggatttgaaagattctgaggttgtggctcggctcaactcaactcaaagagaaatcagatacctccggcatgggcagggaggtagctggtggcatatttatcatgaggattagagtattcctggggtcttccttcctggtgagaaagggcaggatccaaggtcagggtggcatgtgtgaaaaggggaaggaaagacagacagagggaaccaggctctcaagccaagcctacccactcccctgctggaccacagggaactcaagtgtctaccgagggaagagaagtggaagattgtctctcttctagctggggcctggcaagacttggttacagtagccctgtttctgttacatgcttcttggatccaattaacaggaggggctttagaaggacaagattcctgagcacgaggagggaaatttgacacttggtcagcaacctgcagaaggcagcatctatatttcccaagcagatttaagaccctttgagccgatatatcacccatttctggaaccctcttgttacattgctatatcatggcccaagatctttggactggaaagtggaggaggtctcatctgcttacctactgacaatttggtcttcattcccttggaaattaacagtaggggagatgtcacagagcattgacttgattttttttttaagtgggagggaggagaggaagagggacgttgtagcttgtcacaaaatacacaggatattttgaagccatacctaaggtattcactccaggatgtggatgagctgcattcagttgactgaattttgtgtgaggggaaaggatggccaagagaatgtgccttaggatccgtctttcagccaggcagccatggtggaaggaggtaacgctgagtttgagtctgggctctggttgctgatggcttcatggagctgttcagcctcccgagcctgttcaccatctctgaagtggggatcacaagggttgttgtgagcactaaaagctattaccaaccccagaagctcaatgcgtgtggagctatggtgcccactgagtgatgtgaaagagaaggagcagtcggaggcctggagctgttctcgctgtccttggagggcaggaagtgttcattttacgctgtcaggaccctgtctgactcctctggtgggagcccttggcgggtcttggctctggaaatgcttagacaacttcactacgttcaacccaaatcatgaacctgagaaacgcagcattaaatcacctagcgaaggcctaaggcgtgatgtgcataatccaattacacgtactctgcaagcaagatcttcccttcaacctctcctggaagtgactgcaccttctgagccaggccatgggtgcttatcacttgtgtggagtacatgttcgttgtcctatttgtgctctggcaggaaatgttcaaggagggaaaagtgaacgcccatgcatgggcttggttccaggctcctagcgcctctttggggttagggatgcaagagggaattattgacttcctttcatattgtggatggaggagttcccatattggaaggaatggtataagctggagacaggcggtctctgattgtggaattgattccatttctctgccatggggaaagctacccagttgaaaacagtatcagcctcccactcagacatcactgtgtttgagcacattgtgctctgaagccagcagacgtgttgcaggggataggaatacagcctgaggatagctgtgcccgcctgcctgcagaggtgctgagctgtgatagggacgggggtcaggtggggccttgcccactggcccccacacctgtcagggaaaaatcttcgtttcactctctgttgtacccaagattgttgttagcggaccctccgtctgacaagccctggcatctgctcttgcactgaggaaggagccttggaggttggctctcctgtccctgcttcccagagtctgctggaccggtccttgctgtgccttcaaaccaccccaaggagacctcgagggagtttctggctctttgcagcaggttgctcttgcactcagagatgaggaacgcttcagttttgcatgggagattccttttctcttttgcaaagaggacgctcctacctgacaacactaaggcagaaaaccagcctctcagccttggaagcttaacagctttgaaagccactgtctgccaaacagccgctgctgcctttgttccaagtttctgacgtcggttcactggttcatgttttgggcaagcaggacacctcatgaccccattgatgcttcctgtcccaactaactgttctagctgcgtctaattgggccttggaaggaaggcatggagctgggaggcggttggcacctgtggacaccatttctcagcctcttcatataccttttccaaaattttcactaatttacccacaagacatgtactgagcaaacatgccaggcactgttagaggtgctaggatggagaagacacagtctctgtttctggaactcacaggttgccaagcagtgcacaaaggcaaaagaaacagtgtacacctgggatctgtctgtttgctaagattgagcacctgctccatttttacctgtagtcacacatgtgatcctggcacaacacagagaggtcggctgacttgtccaaggactcatagctgataaaggatagagctggaagtctgccttattctgcctggctccattgtctgtgccgttagagctcttagaacagagaaatccattctgacctgaagtgggagggcattcagaggatatggcctttgaactgggcaaagctgagcctagaaggttgggtaggagaagagacctttcctggtaagataagagtcagggtgcgtggagctattcaactccatcttgccttgggtacaaatgttcagtgcacattttctctagaaacagacttgttcatgaaaggagttagctgtgtctgcaggcagcaaagctacttctttgaagccttctttcccctcctcttctttgtctcttcctcaagggatcttattggctctgcactataaaatgtggattaaataccttgctttcagtccttgctttctgggattttactaaatagttatcaccagcagaattaacgggcctaccaacaatttgtctaaacaaaggggccctactggagactcattttaaaaccaggtatccagataaagttgtattgtccgaccacaccagggaatactaggtagccattaaaaaggacaagaaaatttcttcagaacattcctaaattaaaatcaagctgtatagcagtatggttcacaggagtccatttctgtataaatacatttgaaatgtgtagattttcataaagaaaaacctaggcagatttaacagtagaatcttccgagggtaggattgaagggtaattttaaaaactttttaatgtctacttatttttagtattttcttaaaatgggcatgtattagttttgtaataagatattaaaaattacattttcttaaaaaagaaaaagtggaggagctcagagtaagcgcccatcctagaggagctggagtttcttagctgggaggggttggatctccgcattggactctgtgatgctggctccaggggcccccatagctttgtgtctgccatagtgtctcagtgcagatgtggggtcagaccaccctgggacagtgcccatgaactgcctagcaacagacgtcacagaagtgctctgacagctttgaacaacggccgcagtgccagcctttcacccagaactgacaaagggagccctctggggccaggagtgccatggcttctgtggctgccgttaactttgggatgaggccaggtgggcagtttgcagcttagctgggggagagtagggccctttatccataacctgaaatgcttactgcctcctcctgccagagccatgggccttcactgtgttctgttatctgttcgcggttgccagaaaaccatctcatattgacaggcgagctcccttagtaaggtgtgagatctggaagcttctcagatctattctctatggcactttccaccaacccctcttgctttggggatcttcttaggaatgagcattctttggatgaggggtggtggttgacagatttactagtggtgggatttggccaattactagctacctactccagccccctaagcatctattaaatggccacaacccctcccttgccaggtggttggaaggtgcccaggcattcattcaggcattcagtaaatgttagttttcttctcttgcactagttgagaagaaagatgtgtgcataggtggataccagcatacctaacttctctttcagtagtggagaagaagttgggtggggcgaagggagaggaaagagaagcccaagcccctgaggctagtgttgagtggggaagttgggcctctggagccagggcagcggagtccttgactggggaggagacagggagaattgcattgttgttgataatactgacttgctgcatggcaagtttttagaagggttcagcaatccattttaaactctttgtaaatgttagctactgccatgaggcttagtagctgtgcgccatgagctgctgcaaacattatcttacaataatcctctggggtctgctgctttccccctttacagataaggaaatttgaggctccaggacttgaagtaacctgccccaggccacacagctaggaagtgccagagctgggatttcaatcctgttctgtctagttccaaagcctccactcttccagttaccccgttttccaccactgatgtccggtgacgttagctctcattccactggcccccagctcatctggctctggggcctttgctgtgatgacctgccctgcccctgctctgtaaggcaggcttggagttcctaagaaataaggagccttccccagggtccagcctcagggtggaagatgctggcagctaatgctgaaggcatgtatgcatgagcaaacactgccaggactgtgagcttaaaaatggatccctctctactcagagggaaccccatgactctgcggttttttaaatgcatgcattatttatctcaggcttggaaacaaacattgagaaattatttgtgaaacgggggtgcagggagttggggggtgcttgaagacataaatctttacattacagtctattaacagacttccttcagcgagacattcatgtgaactgagctgggggcaaaggttttgggggtgcttccccctgccacccacccagtgaaggagcaagaggaatgggaagagccactccctccctccctcctgaggtggccacgcctcccctgccctccccaactcagctgtactcaccaccgacttcattgcagcagcagcagctccaggcgcagcacctctcccatgccacacacggccccccggtccagttgccaccccacccgtcaggtctccagcctccaggaatccccccagtgacagggagcagctccgggctgctggcactgggcgccctgggcagccaggcccatctgacggtgaaggatgagaagaaccaccatgaactcgatcacagaggtgcggctgggctggggcagagggtggggcggggcaggggtgggcatgggcgctcataggcctcacagtgagtggacccagcaagtgctgtcgtcctaagaccaggagttaccaaggatttggagtcatctgttgatacctggtgcagggaagccagtgccatccgcatcccatgcaccttttcctactccttggtgtggacctggtattctctgtcctgaagaccctgtctgttcatctggagctcgctcccatcttcctacaacacccttgcctgtccttcaggggccagccccagtccaacccttcaggatgccttcctggtcagactaggggctttttcaagttcctgtaagagtttaagagttgggatgccaaagctgagtccttgttactgtcgtcttacatcctacccctggaaaatgtcttgtgctcaccacgatcattagttccctaggacaggtgccaagttcttgggtgttttccttacatctatgtctcaccaatgcagaaacctgggaaaggtgcacagtcagtgctcaggtaaaggtttgttagctggctgcctgtaagtgggggtagtgcacaccccagcaagagatcacatagacttggagtcagaacttgttctctgaccctctctgcagcccctaccatgaggacccatgaagctgcaccgagcttggcctcaggagtggttcattggatcagaaaagagaaaagcctggctccctgggaggcccttttcaaaaattggtgccaaatgcactctgcccttagatacggtatttactggggcacgtagccaacaccttctgagcactagggacctggaatgtcaccatcctgccttggcccaggccacagggtggtagccggtccagggaactggaggctacatttttttgtcttacagtaggatggtccttttggcagaggaagaggggcctctccatagcagacaggagaactggggagctagtgcttagctgggcacagtttcagaggcttcagcttttaggggcatcctgacaaagaatcacagaatggtgttaatttcaaaaacaaaattaaaccactgttaaattcctttttttttttttttttttaacaataaagttcttaactcccaggtcctactggtattttatatggcatgatccttctcaagcttgtgatcttaagacccctagcctgctaaagagtaaacttggtgccctctggcatgacagggagaactgggtcaaaggcctaccctccccaccctggggactgggcctcccttgcccaccctggggactagaggggtgggggcagcattggaatttgggtggcaaatttccaaaccgagaaacgccacctaatggccctgccttggctgatccacggagacagcaatccaggccttctgctcattttaaaaccagtgcactagcaaatcacaaaagccagctggacttagactgacctttttcctttcttttttgtctttttgttttggggtgcctgaccttcctcctgtcctggccttctttccccaaagagagagaatccagtgcggtaagtgttggcactctggaacccggaggggtgtttgggtgctgggaggaggtgggactcggggctcccagaatcgcgggcctgagaccagtcagtcggtatccaaagctggcttctgggttcccgcttctgctctgtgggttgtaactagggattttgttgtttgtttactcttgctgagctgggagcttcagtgctgatgtcttagtccagagccagtggcagggtgaggggtagctactgtcataaaatgggagctgctgtcgtcacctgttgagagtgaccttcagttgtggaagcccttcctctctccaggctttaggtctgccatttgtcaaatgaagagcttgggctaaatgagctctaactccgtttcatatgagaggtgatactctgagaggtcagctgaccagccctggatcttccattgcgaggggctttgtggagtctctgggctaaacccagggctaaggacccaggtgtcccatgttcagggccaaggtttttaccacccccctgctaggatgcctcctgtatgatcttgcatcctcctcattcccttcaaacgcctgcagtttctccctgctctgggctttcactcgatttaagaaagtgctagcaggcgagcattaaggccaggccgcctgcgtgtctgccagctctgagatttgttgtaaatctttctgatcacactgaggctccgaggttctgtttcaagtgaataagccttctgaataagcgcagtggagtctggataaaaaaaatcctccagcgattagcaaagctattttattcctcatcgctgtccttgtatctggggccatctaatctgttaggatggctttggttattacctcgtgttaagtaggacttggaaggtcaggcagttaactaaccatctagacagcagcttccttgcgcagctctctccaatccagccctccttcccttcctggccctccccctacccaggctgactttttaaacctcccattagcagtgaggctggcgtccgtggcctcttgacccgcctacatgctcagaaatccaggaccacatttgggctgaggaatggctaggtacctaagagaggagtcattgaagctgaaaatccatgttcactgcctcggtactgatcctctaacagtggcattttttcggagaggcagtttgcctagataggcggaggcctggattggacattttaaggctgaggtctggtcccagctttatgaggccctgtgtagttctcttggcctctctgagcctcagtttccttatccataccatgggaataattcctgcttgaccaacctctcagctttgtttcggaagaccctttataacctgactgaggatccagattacctggctagcagggacccacttcagtggaattggagggggagtgggaagcccagcactctctaaagagcatgagtctttacctcatcctcatccctattggcttctggctttgtgccccatctgtgaaagttttctgctaaaagaccccccctgggaacccccaagagctgggctgtttaccatgctcgctgaggtccatgcatggcacacatgggcctcaggaaactccagtgggaatgaatcaagatgctgggcagaggcagcagtgggcagggccgaggctgtgcgcatggcatgtggcgtggtgacggtgtcagcggcggtgtagactgaaataatcaggctttggaaaccaggttgtcaacagatgaggcctacggcaggaaggacagggctgtgtcagagtgggaggggggatggggggacgggctggaagctgtcccagaggggttagtctggagtccaattagtggtagcttcattcatatttccttgcctagccgaagcaataaaaaatacttagttttttggccgcctgccagccagaggcgggctggatcgatgccgctaaatgcctgacatgactctccggtagcggcgagggttttcagcctgactgcatgagaagaaagagctcgctgttctcccgagccgagcaccgggtcgcgaggagaaacacgagcagccgcacgccccctcccctgcccgcccgcctgcaaggggcagccagtgcgaggggctggaagcatttctgcttagcacagggtggccaccaccgtcagaggaaatgaaatgaaatgacggtgatttttctgccggcgattgcagcagctaattgaattgtggctgtgcgcgcatcgccaccgctcctgcacggctgtggggaaggttgagctgcagttccattataacctccattttttcttcaaggcttgataactctgccattttaatttgcttcgggcagaaacttggccgggtagggctgcccagaacccggcttaggaaaggaaattaagttctgaggctggttgccgcactattcccaccgaatactgcccagccccgttccctccaagtggcccttgcccctgagccacgcttggcctctgggaaagtggagaagagaagggaagcctcattccacttgccttctgatgctcttctcttctgaacagatgtccctctgggtctccatatgacctcctgtgttgcatggggactgggacctgggatggcctgtccttttcttccagctccatcatagctggaccatgagctcctggagggcagggattgtatctcattcattctgccactcctggcctgcagcaccagggctgacccagggcagctgctcggaaattggtgggtgggtgaaggtaaagtttggactcttagaaaggagtaaacctcaccaatatcatagaggggcattggtcctgatattagtctctgggcacagaggtttgctggcaggtgcccttgccagttgcacttccctccctgctccccagctcggtggtaacagccacatggtgatttctgaccactatcaacccctaggactactccgtcatcttccctcttcccaggcctcccatcccaaaggcttctcatcctcatttgctttatagttgagggagaactcacgaaattttggggttccctttgtgccaccttctgctaggggagcttgggcacattcaccaacctcttggggtctccacttggtgatggctacagaggcagtgactgtccctgcccttgctcctttccctgtctgtcagagggaaaggcttcatgacgtggcatttttgttttttttacaaccctggtgtttctccagagttgctgacagcctcaccgtggaggcgggggtgttcacacagaacgcttggctgctcatctccactgggaagttggtggctgcctgacgccctccttccctatcaatctccccattcctgtcgggctcagcaaatgaagtattgctcatggcccctgcctgtcagctcagatccatcttacaagactcagtgcaaattccacttatccctcctttgagcaaatgagtgtggcaagcgcgagatgggtggtgaatgagacccaggtgaccctcgccctcacagagcgtagtcccacaggccagaaggcagacggcttactgcagggttaattatttaatagcagtgcagagctgcaaaagagaattggggatgcgcccagggcatctccccggggactcagtctcaggggagtggggaaggcttccctggcaaggctctgatggagccacgatctgcagggcagagaggagttcagcttctcttccctcccctgacctccgtgtcacctgcacttagctgtgtgcggatgtgtgaattgttacacgcagcagaaagttttaaccccgaaccctctttttccttccagaataactctgtgtcaccctcggaaagcctccgggccagtgagaagcaccggggctctgcggactacagcatggaagccaagaagcggaaggcggaggagaaggacagcttgagccgatacgtacgtccaaggcgccatggcaccactggggtttctgttgggtagggcagggggtgtctgcagggcccaagctgtggccagggtcttcttgtggttggcagtgagtcagagaagcacaggttggcgataggggaccctattgaggagagcagggtgggaacagggctagggtgaagttcacacacgctatgagcatgcgagccactgtggggcggaggtggatggggaggtcgtcctagcctccatggggtctcttcccacagacaggccaacaaccccatgctgctgtcatggtgctgccggaatcccacttggctctaaggggctgctcccagtgacccccaaaatgtggaccctatagtcctctcagttggcctgaggcatgcactcacttggccacccagtcatggcttttactagccttttaatgggatgcccccggcacgtgagaccctagtggaagcatggctgttgtgtttcccctgtgtcaggctgtgcagggctgagagctgggacagagggaaggggaggatatggtgcagggcctcagcggtcttgcacccagccctcttcagccacatggctgctgtgtggctttggacacattgagcacccaaaggacactcagctgtgtttctgtgagaggaggcaagttaccatcccacacagacgggtgggaatgaccaggtgagagcagcacactgactgtgaaggatggtggatgtaaaaccagctgggaagaaggttctggcttcagagagaagcagaagggcaggctgtgggggcaggggcttagaactgctatgatggagcgggtgtcagtgcggctgcccagtgggtacaggagtggagtaacccggggcctgggctaggggacagcctcacggggagaccgtgttgagctggagtggagcctgttgaagggcagggctggagtagaaagcatggactttggggtttggcctggcttcaggtcctggccagtagaaggacagggtggtttgggctcagtcaggggtggggaaagtgtggcctcttactgaccagttggcttctctcttggttgcaggacagtgatggggacaagagtgatgatctggtggtggatgtttccaatgaggtatgggcaggcccggtcgcaagggggctcttggtttggcatggtttggaattattcctccccagggtgggatctattctgtctgttctagtattactggcagcctgagcagggagacaaggcctccagtcttggggtctcagggggtcaagaggagcagggcagggctttgctgcatggtgtctgggcatttatgggcctggagggcctcctgcaatgggtctccagagagacacccccaaagatcccaggtaggggccatcttctattccccgtgatcctccgtccccccagggtctcagcctcaggggcctgaggaggagctggagagcatctacatttggccaaacccagccatgctgattgaagtcctgaacttgtgtttgacattgggaagaccatccttccaccctccctaggcctcagtcagaccagatggttaagagctagtttttcctcactgtggggcccccagtctttcagccaagctcgtcttcccatcgcccatgccctctctcttcccactcccagagcagggaagcctcgaggctggctgttgctttcagtgcatctctgcatcacttgtgttttcaggaccccgcaacgccccgggtcagcccggcacactcccctcctgaaaatgggctggacaaggcccgtagcctgaaaaaagatgcccccaccagccctgcctcggtggcctcttccagtagcacaccttcctccaagaccaaagaccttggtcatgtatgtggggtctgggtggaagggagtgggaagggagcggcagggactggagctggggtggtgccgattggcaggcagaggggtggagtgggagaagctgggtgggtgattggccccggtttaccttctgtgcctgctgggcctgtgctaatgagttaacgtttctgagcctcggttgctacgtctgtaaaatgggagtgatcaccccagtccctgccaaacaaggttgggcaaggattgagaggctgttcggcagaagcttcataagggtctggctctgggcttcacgttgggaccggcaccagttgtgcccggctcctaggagaatggaagcctcatggcctcccttgttctgcatctcccctcttcagaacgacaaatcctccacccctgggctcaagtccaacacaccaaccccaaggaacgacgccccaactccaggcaccagcacgaccccagggctcaggtcgatgccgggtaaacctccgggcatggacccgataggtataatgggtaggcaccatgggctgggttaatctgattggggggagggggtctgctcttggccagggcaggggtgacacacacgcatgggatagagcacaggcagtgtctcccagggcctgcccctggggacttcacggtcagatttgaggaggtgacaccagggtttctgggacccctgctgggccagacatgaaagcagcatcagacgggtcagggctcccaaaatctgttcccacccctgtcattagtccagtgaggctctaagcaagcccatttgggcctccatatcctgctctgtaaaaagaggtgggtgcatctgccaagctctaagcttctttggctctgaaggcagggatcccacttgggtgggttcagtctgagaggactgcctggagcaggcagcttaagaatgcagggagggttattgctgggtgaggcggccatggccatgtcccaatccacctaaggcccacctccctgacgcccacccctcgcagcctcggctctgcgcacgcccatctccatcaccagctcctatgcggcgcccttcgccatgatgagccaccatgagatgaacggctccctcaccagtcctggcgcctacgccggcctccacaacatcccaccccagatgagcgccgccgccgctgctgcagccgctgcctatggccgatcgccaatggtgagctttggagctgtacgtagaccttttggctcctttcttggggactgggcgtggtgtggggagccagtggttggacgggtgctccccacatgctaaaggggcccctcagggtctcaaggccaggcagctgcccctgtgggaaggtgtatcggaaacaattgagacttggctggaagggtacactctttggggccagcagacctgagttccatcccccactggcctgtgagccgccctgtgacctcatgcaaggcagcctcccttttagtctgcaaaacggggctgacacctggctttcccagctctggggggtaggaatcccagggcgagtcaggtgatgtccatggagcaggggtctcgtagatgggactggttgtacaagactttctattgtggtgaataaataataagagttaggggtcgagcgcagtggctcacgcctgtaatcccagcactttgggaggccaaggcgggtggatcacctggggtcaggaaatcgagaccagcctggccagccaacgtggtgaaacctcatctctactaaaaatacaaaaattagccgggcgtggtggcaggcgctattcgggaggtgaaggcaggagactcacttgaacctgggaggcagaggttgcagtgagccaagattgcaccaccgcgctccagcttgggcggcagagcgagactccatctcaaaaaaataaaaataaaaagaagagttagggttggcggggagaggggccctttttcaggagacagttttcctttttacctcctggacctggggtggcctcctctccactggcaggcccactaggaccacaggagaggaaagaagtagggcagggccagctctgccttgcagaacagggaggatgctggttcacagtggggtctgcactgtcaccccttccctgccacgggctgtcctgggcctgtgtctcctctgaatcaatgggctctgctctgctcagcttgtctcttgggttacaaagtggcagagccgtgcaggtaggaccccgggtgggtggtggaggaggcaggggtgggggtgtgtggcagcacggctgatggagggctgtcttgccttgctttacaggttggttttgaccctcaccccccgatgcgggccacaggcctcccctcaagcctggcctccattcctggaggaaaaccgtaagctttggctatacttactgcatgctttgtagggtgggcaggagagagcactctacccccaattccaacaacgcccctcatcccctgaccaagggtttgccctggtgcacctccctttggaaaggtatctgtccctctagaggcaccgagggctggttgcaaccccaggaaactgtagccaagccacacttctgagcacccacagaagctccctccgacagaggagccatggagttagctaagtacatggccactgggctgggagagaaggaacactcctcaccgagtcacctggagctgtggtgggccttgccgactcctttgggttcgacctgctgggaaggccccagtgccgctggtcgcaggcccttccctgtcagcagtgcttccctcccctggagggcacactctccccggcccttcacttccttgggttgctaggaaactaaaagattgagcctacagataatgccgagacactgcctgacacagtcctctaattgtccacgagaatctagatgctgattgagagggcacccaccagagcctgaaacagcaggcaggccaggctggctcaccacaggctctgacatggactttcccatttgctattgcaggggcaagcagatcccttccctaataccaccggctcctaaagcaagaggtggcatttcagccaggccctttccagggttggcatgttgggggaatgtatggatcgtgggaaagggcattccaggacacctgtgggtttctggtctgatttgaagcaaggatatataactgggtgtaaaaatcaaagctggtctgttaatcactgtctacctcgatggagccatcccagtacatggggttactgggttcgaatggtttcagagcagagggggctagaggcagggcagccagtcgggggcagtgcagatgacctgggccaggcctatgggaactctgaggggccggggtggatggcagcagtgacggtttctcaccttttcagagcgtactcattccatgtgagtgctgatgggcagatgcagcccgtgcccttcccccacgacgccctggcaggccccggcatcccgaggcacgcccggcagatcaacacactcagccacggggaggtggtgtgtgccgtgaccatcagcaaccccacgaggcacgtctacacaggtggcaagggctgcgtgaagatctgggacatcagccagccaggcagcaagagccccatctcccagctggactgcctggtgagaatcccagggctgctgcgcctcctccagctggtgtaggaggatggggcagcctgggccacaggggagagccccagggcccggctcagcatcgtattggctgagcaactttaggcaagctgactaacctctctgagcctcagttgtgccttctgtgtgtggggctgattctgacctcctggtattcatgaaagatcaaagggttgtgaatttgaggaatggggacagcctggcagctgctgggtatagggggaggctgtaagcaggactggtgagggtgctcggtgttgctggacaggactctcctggtgcccaggaggggaagtaggcagcactcagccctgccccttctccctccagaacagggacaattacatccgctcctgcaagctgctccctgatgggcgcacgctcatcgtgggcggcgaggccagcacgctcaccatctgggacctggcctcgcccacgccccgcatcaaggccgagctgacgtcctcggctcccgcctgttatgccctggccattagccctgacgccaaagtctgcttctcctgctgcagcgatgggaacattgctgtctgggacctgcacaaccagaccctggtcaggtgagccggcaggagggagcattagtgcctcgtcctggggaagtttttacccatcctgcctggtcttgtttgctgtgaccttggccctgtctgaggcactgtggggtggccagaaccgttgggatgagggatgcacaggtgaaaagacagctccgcctgccttatgcgagggacagaggagggagggccattgggcccaggagttggagagggctctgggaagaaagtggagctggagcatgtctggggaagtggaggtcagattagtggagcaagcagagagtctgggagcagagccccagagaccagattagggagacccgactgggaagccacatcacgtggtagctaaacaagcctcaggacaaaactgctggctttgaatcctgcctccactatgacctagtgcaagtcgctgaacccctgcggctcagtttcttcctgtgtaaaacagtgacagtggagcatcttcctctgactgtgccgcagcgcaaaggcagacgggtgcctggcccagctgactcttgtatacatgggctgtgtgtgttattcagcgtgttcatggatggcctcagccccatagttcatgcaggatgaagagatagattaagagggcaaattgagggcgtgtggagtgcgagttaaggagctgtgtcctaaaggcagtggggccctgcattctctttatcagtcatctcacacgtagcttccccagggccttcctgccttcctcaccttcctgagcctccagctccacctcctccagaggcccaccctggagggactcagtctcagaaggctagtgcaaggtccctttttcacctcccccccccatttcccaggggacttgtccctgggcaaacccttccgtggaactggaaagaggcctggaactggaaagaggccggggctagctttgctgcaagctcgctaagggaccatgcgcatagtgcactcttctgggcctcagttttctcttctgctcagactgcccctgggatggccgccacctggcagtctgtggttcccgggactcaccctcctccctgcttggctttcgtaggcagttccagggccacacagatggggccagctgcatagacatctcccatgatggcaccaaactgtggacagggggcctggacaacacggtgcgctcctgggacctgcgggagggccgacagctacagcagcatgacttcacttcccaggtgtgcggcccaagactcctcccttcccaaagagcagtgtgttccctccctccggggccccagtggctgggtcagggacaaagggaccctcacagagtggccacggccaagagacttgggaccaacctgagccatctgggaaggcttcctggaggaagcagcagtgaaacagatggagatgaccttggggttggacacatttggcccaactgtggaaattcgattcattctctgctgctattgagcactttgtcctcggcgtcctcattcacaagatggaaataatagtagcaccctcctaggtctgatgtgggcacctgaaatgatccctctaaaaggcgtagccataaacccgactcacagaaagcattcagtaaatgccagggattattatttcttatttgcattcctcactttaatattttaatcttaaatttttaatattttagttttttttttttaactcacttttttcttaaggaaagatgaaagtctcagagacagagtaactgaatgcaaaatgtctgtgctttctcacctataaaatggggatggaaaatgacctcccatactcctgggttattgggtgggtggggagggaccctgagcctcagaggacctgagcagcacctttgggagccgccctcctcttgagggcagagaatgctgagctcagtccatctgccctcccaccacctgcagatcttctcgctgggctactgccccactggggagtggctggctgtgggcatggagagcagcaacgtggaggtgctgcaccacaccaagcctgacaagtaccagctgcacctgcacgagagctgcgtgctctccctcaagttcgcctactgcggtgagccttggatgggcccaggcctgatggagtggggtggggaacccagggcagcctggcccaacaggacagaagaggggcccaaagcttatagaataagctaggccctggaaccaggcctcctgacccctgagctggtgccccttcaacacccttaagtgatcttgttccacatccttgtttctcggatgcagatgtcaccatgagttattgaactctcaggacactaggccagagccagttcttgcaggcttggggcaaaggaacaggacagtagcagtgcaggcagttcctctccatggttacaaccacttgctttggcatctgagagccttggatgggaatgtctgctcctccactgacaagctgtgcagtcttgaacatctcaccctctctgaactctagtggatttttctctctggtcgggaatagcatggtgctcatggctttcagggagcataagggctttaacacttgtagagccctggccgagttcctgcttggaggaaggtcgcccactgactgctgtcttcagccaggtctccagactcccagggcttggatattttcagtatttcctgttgccttccagtagtagaatttagaaaggccagtcaaccttagtggctttaacaagaatcttttgaggcagcgttatcactgcaatgaacttcaaatcctaccttttcccatcctagccccgcccagccctccccctggatttcagagaaaggccttctccaggtgtccgcatgtcccatttgcaaaatgcctctcgaaattggagagttatactagttagcagttctcactgcttttctatggcagctggccatgtctagggcaggtcttgctttagagggcagtgagctacaacctgatcatgcctttgcctcccacctgcaggcaagtggttcgtgagcactgggaaagataaccttctcaacgcctggaggacgccttatggagccagcatattccaggtactgcccaccgtctgagtcctcctctgggttctacccagagttgaaacttggtgatggtgatgggagtgaggatagcagcaggaagaacaggaggagcctggagccaggatcagacctgccctggtcccctccccacccctacctgataggggagcaagattgggttctcccaaggacctggggacttcagcaggacacacaatctgctactgatggcttctgacccccgagggcaagggcttctaagccggggcgcttgtcggatttggagagtgaggaatagcataagtgtttttgctctgggctggatgctgagcacctgcgggaggtgcgctgggcacctgggcacccggcagccttgcccagagcagtgttgcctcctcaagtgagtgagtgtttccacctgcattcagcaccagcagggacatggacaggaaagagaggaggaaaggaagaggctttttataatctaccaggatctggggcctgccatactgcactgattggcacacacacgtgtgcacacacacacgtgcactctttcccatacacgatcaaactcacactcatttactcacgcacacttggtctcccccacacactttcttcctctctctctcttgcgcttccacacacacacttgcattctctctcactccctcagccaacatgccgctttctggacccaggctgaaatgtctggtgtgcagcgtgtcaaacctcattgttagggtctctagttacagcacatgcttcaaacatcaggtggcaatccttttcctaactcatcaggctgtgggcctgagctgctgacgccagctcctagcttggaaatgcttcttcctatttgtaaactcggaggagaagctcttgctaaagcgtcctgttctgatcattatgacttactgtaaagatcacgtgggagactgttactgagcttttccttatggaaaagcaggtgggaggggagctctacctgaaaatgcttcatgggtgctttaaagcctcccccacctcctcttcaccgcactgtgctccaggtcggagcatcagagaggggcagaggagggcaattgttgccgagagaaccgagatggtgttgagcactggaaaatgaattcctgtcttttttctccctgcaccccacgccttcctgctgcttctcctcgtcttcctcctccagtctaaagaatcctcgtctgtcttgagttgtgacatttcagcggatgacaaatacattgtaacaggctctggtgacaagaaggccacagtttatgaggtcatctactaaacaagaactccagcagggctgtcaaactctgggagaaaccgactcggctctgacagggagacccccaggcgaggggccccgaggatggcggaggatgggccgcaggcagccgagcgttcagggctgcgctccggccggctgagagggcacgtgccccgtcacagtctggactcctgggcctggattgatgtgtctcacagactcggaagggttctgctcctcctcctccccctgaacaatgctggcagttgctacaaatagatttattggaggcttatggctccggttcccccacagacccgctcatgagtctctgtttgttcttcccttttcttttgccctgtccctcaccttgggtcgggggtgctggagtggaccacaatgttgtgctgggggatgggggggtctctctttgccgattgtgcagtgcacaagatttgtgaaaaatgtaaataacagactcctattgcggactgatcagtgggagaggaggccccttcccaccggaaactctgagtgtgtatttcgcctgctgtatttgtaatccactcgtggtggtggctttttttttttttttttttaaataaacagatgctctcacctgggaagaggagacagggaggggaaccaattgaagaaagaggagaaaagtcttagagtgtggaaaaggcaaccaggttggccgtaaggtgcctgctggaatgcgtgtgcctccacacgggtctgggcatccggactgataaccagccggccagactgagggatggaaggcactgagatgggggcccgtccaggcggacacccgcagaaatggagctttctgtggtctcttgcactctggctgcctcttgccctctctgtgtctctctttcttggtctctccctctctcctcctcagcctggtctttctctttggtgcacacttagttattgttgtgagcaatggaagttcaaaggaactccctctccagctcttctgaatcttgggacacagcctaaaaaggacaaaaagttagaagacagcatagcaactcagctcagggagctaccagagaaaaatagcaactgatgtgggtgctttttttttttttttaatttgaataaaaagaattagaagtgatgtccttttataaaatgccttctcccccttcccgcctacagtctcttcctctccccttagaggggggaaagtgtataaacctacagggttgtgagtctgaaaagaggatccccctcacccccaccctgggcagagcagtgggggttggggggtgggagagggggacacagatcctggcacactgtggatatttcttgcagattgcagtctcttgtggcccaaacaggttaggtagactatcgcctctggcaggtgccaccttttggtaccaacatgttctgaggtgttaggatttgggttgggttttttttgtttgttttttttttccttttggtctttttttttttctccttttaaagaaaagctaaaggccgctgtgagtcctggtggcaggctctccatggatgtagcatatcgaagataatttttatactgcatttttatggattattttgtaatgtgtgattccgtctgctgaggaggtgggaggggctccagggaaagccacccaccttcagtgaggttgctccccagctgagcgcaccgggcatgggatgtggaggctggcgacacaccctgtgcctctccaaggctgggcgcgtggggcgtccagagtctctctgggtctcagatgtccatctgccacctcttgttaaggctctagccagaagggagggtgagggtagaagaaagttattcccgaagaaaaaaagaatgaaaagtcattgtactgaactgtttttatatttttaaaagttactatttaaaggttggtttgattgttgcgtcttaattgcctctcctcccagtttgccagtcccgccccccgccccccgggaaaacagccaggccactgttgctgtcacattctggagcctgggccagggccatttcccatcgatgtgagctcttctcatctcacagcattccctgcgctgcttccacccccttctccccttccagatacccagcatcgcagcagggatttcacaatcccatactgtgtcgcctcccatccaagcgccagggagggtggggggtaggagctaagacttcctctggacagatgggcagggcagagttcactgaggtgaaggaagaccacaggttaacaccaaagtattgtacagctgtcaatgcaaaacttttttggaaaaaaattaaacgtaatgaacttgaagcgaaactgcaaagtgtctgtgaacatctggaccttggaaacctgcacaattttattttaagcttaacacgtttaggtgggacgaggagatcttcaatctctaggtcacaaaggtgtgtttttggatgatacagaaggaagcatttgcagaagaggcagacccagaaatgcaggtcattgtccccagggagggagtcgggggctgggcgggaagaggagaatgctggtgcccattcccggggcggtccccaggctcttggatttcatgcacccattagcaaaagctctcagggcactggagattaacatggtttccaactccttattttgtcaaagtcattctcagcacaaacaattgcctgctgtcatttcatacaagaaagggaatctcacatttaaaaaaaaaaagaggaacgacagtctcagcataaagcacagtctttatgactagaagggacaactggcctctctccacacagaggggtcatttagctggagagggaggtcctctcaggcttatggaggagacaatgccagcaggtagaagggaccagacaggctgcagtgggctacagctctgcctcaaatggttgcaggggtgtgagtcaaacagctctccttggaccatacctttctcgtgtgtccatctctgggcattgcaacagagggctagggggctgggagcaggctctggccagaataagattgtgtgtttgtccagagcatgaggttacccatgggagccaagatcagggtggaattggggcttgcaggccccagtttggcagaagaggaaaatgtccatcagggaatactcacccccccaggcttgtcctactggaaagcaaggccaatgttactctttgaggagagactgaaactctgcaagtctgttcactgagatttcctgggcacactcaaggatggagagatgaccaagagtcagtccctgccacagaagctcacagttcaaggtcggggagatgatacagccccttacttcatttgacctgtgttcccactgctgctgtccttaatgccggcacactgggcctcccctgcactgagcctctctgcacgtgcttcctcctgctgcgtctccccatccaccactccactgctttccacccaaccctggctggcggcacgaaccacatctgggagcgtgttagaaatctagaatgagcccctcagtcctacccaagcagaatctgcattttaacatgctgccgcgattcctgtgcacatcagtatttgtgaagcattccagtctgaaaggaggggcccactccatggtaaacctattcccatccttaatccccccatgttgccccctttttacttaacagggtgacaggaggctttgatgccatttttctggcctttatcaccctccaagtgttcctttcctcttatgcagaaatccaggcttgtagcaaccatagcgtttacaacatgttcctgcacctatttgcttgtctcttcccacctagactagtttccctggagggcagtgcgcaggacctcatcagcccagggcagtgctagtgaatgatgagctttcaccagtttgagattatcctaattcacagtgtctggcgtgatacccagggcatccgatactcagtaacccgagcccagagaagtgaaatgatgtctggagtgttttcaattctattgtgctgtttttgctcaaagcaagatctgttttttaaaaaatggagggccacagttgtcagaggccaggtttaatgttttagttgccatcaaattataaacaaatgggctgggcatggtggctcattcctgtaatcccagcactttgggaggccaaggtgggcagatcacctgaggtcaggagtttgagaccagcctggccaacatggtgaaaccccatctcttctaaaaataagagaattagctgggcttggtggtgggcgcctgtaatcccagctacttgggaggttgaggcaggagaattgcttgaacccgggagatggatgttgcagtgagcccagatcatgccattgtactccagtctaggcgacagagcgagaccgtctcaaaaaaaaaaaaacaaaaaaaaaagaacaaatatttgggtcatctttggcaatagctgacaaagccaccctttctagcttccctctgagtcgcagcccccaggtggccccaaccccagcgtgggcagtaattgtctaacttgtagggtctctgagaaggtatggagacagagatctggacgctggagccagaaggatccttagcaagactgctaaatgttaggtactggccatcaaatggcccataatgatgcaagtgtaattttttttcccaataacttattcagtgtttacaaatgagcatcatttttaatataaagcaaacaaatctgaacttttaaaaaaattgtatgattaatggagcatttttaaacattataccaaagttggaccttttatatttgaagagacatctatactaagcccaattttatagatggggcaattaaggcccagggagggcaagtgacttaacatgactcacagagtccaagccaacattatgatgaaacatccccctcccctaaacccttagcacactcaggatggaaagctaggagggaactgcccagcctacaggacttgatgttgcttggaggattaatatccagggaatgagtcttcctgctcctctaccaacagtactggtaaggaaattactcatggaaaggagatggcccagaacagtcatggaaaccagcctcctgcctcaagaacttcctagaactcacccacccacccatcttgcccatccttctatccatctatccacccatccattacccacccacacatttatccgtataccccttcattcactcttccatccatctatctagccatcctattcacccgtccatcctaccaacatttatatagtaagaatctaatatgtgcctggcatggttctcgatgctaagatgcaaagatagtaagatgcagtgcctgcccttagagctctcagccaactgggagaaaacagaaactgacaattcccactccatgagatatgtgaaagtgcaaaccagatgtcaccacacatagctgaggcattgacttgagtatggaagggcagagcaagagggtcctggaaggaccaagagctaaacagaagtgaagaataccatgggcatgccaatgaaaggtatgaagaaaagtgttccaggtggaaggaacagcatgtgctaaggcctggggtaaaagagagcatggtcccaacaatgcatccctacctaacccatctagttcttgctcctccctccagctccatccagccttcttacatcccagttcttgctgcaacttcccgacccctcacccccaccagtagcctccaggccagaagctgggctaggattctggctgagcaggctggtgaaaccggaggagggagctggacagagaccacaattccagcctgaaccaggagaggcagaggaatggggagaagatggaaggaggctgcaattcagtgtctgagaatgcccatgataatgccccagggctctgagtccccaacacaattggcatcagaagacccggggatctgtgattggatcatggtgcatgatcagttccttacctgggtaatatacctattctaagctcccaccacattcacacagttacttttataaactgcacatctggccccatcattgcccatcttggagcccctcactggccctcttcacagcacaactcacccttaactcatctaggtgtgggccctgtatctctaaagtcatccctccccacttatcttgcttcccttcacacaccagcagcacagtacttccaatgccctgaaaagcaatgctctcccattttaggttttgcatgtgcttctctttcagcttgaatgtggtgcatccttctttgaatttctgctcattcttcaggagtaggcctcaatgtcacttcttccaggaagccttccctgactgcccacttccctactccttggtactctgagagtgttctctcccaactttaggtagcacataccaagcacaatgttagtatgattacagatggttctacttaggacttttgattttatgatgagtttattgggtattaaatgcatttttttttttgagacggagtcttgctctgtcacccaggctagagtgcagtggcgtgatctcagctcactgcaaactccgcctcccgggttcaagagactctcctgcctcagcctccggagtagctgggattacgcgtgcccgccaccatgccgggctaatttttgtgttttttagtagagatggggttacaccatcttggccaggcttgtctcaaactcctgaccttatgatccacctgcctcagcctcccaaagtcctgggattgcaggcattaaatgcatttttgacttagaatttttcaacttacgatgggtttattgggacataaccccattgtaagtcaaggaccatctgtatggtttaatgatatcctgtctcctgatgcccacctgaccctcccaccacacagtgggctctcagagaacagcgactttgtcttatatctccagtgcttagtgcattgtaggtactcaggaaaatgttacttgaatgaatcagtgagtgtgtgattaagataatacactaatatttctagagtgctagtgcatgtaaatcatgtcagtcagtgcttcataaatattgtttaatactcataactgacctatgaggtcattgctattattatactcattttatggatgaaacaactgaagttcaagttccccaaggtcacacagcttgtaaggtttgtatgacactgctgctgaatggttggatggatggatggatgaatggatggatggatggatggatgagtagatggatgcatgaaaggatggatggatggatggatggttggtggatggatggatggatggatggatggatggatggatgaatggatggatggataaatgggtggatggatggatggatggatgggtagatggatggatagatgaatgggggaatggatggatagacgaatggatggttgaatggatcgatgaatggataggtggatggatgagtggatgagaggattggcgggtgagtggaggataggtggtggactgcctgcctcatgaggactggagtagaagcttggaaagaactgatcccacgtgtagaggagatcagtgatcttaggtggaagagtatgggaagaagagccaagagacagaagctcccctggctaaatcagacctttcttacatccatttgagtacctctgtgaatgcccagaaaaccccacagtgtgctcaacctgacccggacccagttcccctctcagacaggtcagaagtgggccctagggagctcctgactgctgaggcaagagagggagttaggatggggctatggccttgtccctacagggtatcacagatggaagctgccctgtgcaaatgtttggtggcaacaggttagaagatgaaaagatcgggcctagaatttccaattcaggaaaatgaaacagcaagctaataaggattcactttgaccatgtgaacacagacatattgtataaaattaaaataaaacaattttgctaatctacatgaaagaaaggggaatcctttaatgtggtaaataaaagactttaaaggtagagtggagatccctagctcagaacaatacccaaaaactacataaagcaaaaatggacagaattacaaggaggaatgggaagttttatcataccactaagaggaactagtagatcaagctgtgagaaatttataaggttataaaagatatgaacaacataattaacaagcttgagacatagaaccctacaagcaactattggagcccgcaaattattttctagaacacctggaagtcttagaaagttttaccagtaaaaagaagcagatagagcattttacaaaattcaacacccattcatgactcccttaaagttacaaaccaggaatcaaagaaaactttaatctgacaatggatagctatatcagacctgcagccaaataatagataacagtaaagtttcagaagcatcatattaaagtcataaaaaacaatcaatgagccaggacagcagtgtgtacctgttgtcctagctacttgagagtctgaggcaggaggatcacctgagcccaggagttggagactagcctgggcaacatagcaagatcccatctctaaaaaactttttttaaacacaagaatattcattattactgtctctgttcaacgttgtgctggagggtctagccaatgcaataggacaacataaaaaataaaaggataaataaaagtatcatgattgaagtgaaagaaacaaagttgtaattatttgcagataatatgactagatatacacagaatataaaactgtttaataagggagtttagtcaagttgctggatccaagatcaaatttcattaatcaatagcattcctattcacaagcagcaaccaattagaaaatgtaaagaaaaatgcatttataatagtaaaagctacctatgagtcaatccaagtaaagctacgtaagatctttaaggataaaaatacaaaattttattgaagatttaaatgtaaaaagacctctgtatatcacaaactatgccatagtcatttatgagctttttcatttaagaagctgtattttacaactatttataaatacaatgttaaacaaatccaaatggaatgttttctgtgtaatttgataatctgatactgatatttatatgaagagtaagggaccaagaatagcaaatacaattttgaagagaaatgagggaggagaacttcgcctgccagatatcaagacttactgtaaagctacaggaagcaggaaagtgtgctcttgctgcatgtgcagacaaatagaccaatggagctgaatagagagtccataagtagactactatataggtgagaatgtgactaccacatagatggcattatgcatcagtggagaaaagcactattcagcaataagttctggagcaacaggccatcttcatggtgggaaaatggatccctacctcacacagtacacaaaaataaattctcaaaggattaaggtttttaagcttatagtacagaatattggagaacaacctcaggactcagaggatgggaaaaattattgaacaagacagtaagcaaaagctataatgaaataaagatcaatttgatgatattaaattttaaaatacctgtacaacaagagatactataaagtaacaaaacatgaaaaaacataaacacaatgcctacaactgaccgaaaaaagtggtgtctggaatagataatgaattattccaaatcagtacattgaaagccaacaactcgagaggaaaatgggtagaggacataaataggtgattcacaggagaggaagcagaaatgctcaacaaacacgtgaaaatacctcatctcaccagctatcagggaaatgcaaatttacaaaacaaaatgaaatggaacgacccattcccattagactggcaagttttcgagtttgatcatatgaagcttccatgagggtggtgaatgactagtattgtcaaacactgtgggagcataaattggttcaaccactttgtggttgccaaacaactattactattactaataggttactcttgccaggcagtttggcaatcatgaaggaggaaaagcacaaccctgtgacccactaaatctacttccaggtatgcaccctggagaaactcttcaacaactccatgaagagatatgtacagaatcttcattgcctccttgtttgagcaaaaataattagaaacaacctgtccattaatggatgaatggattttaaaagatctatgcattttcctataataaaattgtacataggcattaaaatgcataagctatatctttctgtagcagtttggataaatctcaaaaacaatgttgtgtgaaaagagcaagttgtggaaggaaatacatgatatgatactatttatataaaatagaaatccacaaaacaattctatatttgagcatatatatacatatatatatgagtagaaagaacaccctacaccaccaggataatggttatctgtggggagggaagaaacggaaaggtcagcgggagttcagctatacctatcacattttattactttttagaaactctgtagagaatgttaaaatgttcacattttaaaaatctgcgtggtggctttagaagggtcgtgttattttctgtactttgtgacatgtttgaaatatttcataattaaagatttttttttaaaaaggcagaaaagtaaagacttaagaactcgcccccgttatagtgtctggtgactcaaagggggcctggggtgggggtgcccatgcccagtggcagatagcaaagccccgggctcaccacatcaccttagtcacgtcacgggatctctccagtccttgatcttttcatcctttatgtgatgcttgaaggcaggtgaataatcaatccctgggtcctctccagcttggatgttttgtggttctaatgattttgtgagtgtgcaggggcagtgctctcatgcagagacagcatggattagatttgtttagcttttcattatgaaaaatgccaaacagagaagtagagagaacagaataatgaatctccatgtgcccatcaaccagcttcaacagttatcaactcagggctaatcttcttttatctataccccacccatctctaccagtcaccaccactggagtattatgtagcaaattccagacatttcatcattaaattagcacatattttactatttccaaaacgtaagacctgttttgaaaatgtaaccaaataccactaaacctaaaatataacttcttatatcatcaaatatccaatctgtattcaaagatccccaattgtctcataagtctttttacaaagtgtatttatttgaattaggatccaaataagatccacacagagcaagcaaaattgatatgtcttttagattcctgcttcatatcacatcctctctctcatacacatccatacacacacatatttatttactggaaaaaaaaccaaatttgtccttagagcttcacatagtctgaattttgctgattgctaaattgtagttagatcttggagcttgattagatccaggcttgattttggagggaggcagaatacttcatagattcattaggaaacacatagcagctagatgcttctccttttgtatgttagcagtcaccgatgatcattgtgtagattcattaactcattaggggctacataagggtgattccaattgcaacatttgcttgaatattgttataaaaagaaactgccccacaccaaccatttggttaccttgaagtacagttcatacaggaaaggcaagatgaatgcttgattcatttgctttatttgccaattttcaaaataataagttaattcttcagtatcctcagcaattgaccaatgaggtattcttttttaaaacattatgaatgtgtgaatttaaacatatttgatatgtttgagtcaagtggagttatctttattgcttctgaaatcatcctacttggggatcctcttgaagatgcctcctgagtctttttaatacgaccatactagtctttgagagcttccatgctttctggtaaaagacaatgtccctggctcatcttgtacattttccatcctggatgtggagttggccattttttccaatgaaccttggttctgtttagtggaaagtggtatttggagaccataatctgggtgcttggggtgcttgatgctaatgaaatgatcattgtttctgggccttttcagtagcagagctaagaaatgtgtatgtgcatatttatatatttgttaatatataaatagaccgtgaggtctactgaggcttctaattcaaattcagggttacagg

SEQ ID NO: 209 - DNA, 2357 bp, Homo sapiens
gaatcacgacccctccctgccatgtatccgcagggcagacatccggctccccatcaacccgggcagccgggatttaaattcacggtggctgagtcttgtgacaggatcaaagacgaattccagttcctgcaagctcagtatcacagcctcaaagtggagtacgacaagctggcaaacgagaagacggagatgcagcgccattatgtgatgtactatgagatgtcctatggcttgaacattgaaatgcacaagcagacagagattgcgaagagactgaacacaattttagcacagatcatgcctttcctgtcacaagagcaccagcagcaggtggcgcaggcagtggagcgcgccaagcaggtcaccatgacggagctgaacgccatcatcgggcagcagcagctccaggcgcagcacctctcccatgccacacacggccccccggtccagttgccaccccacccgtcaggtctccagcctccaggaatccccccagtgacagggagcagctccgggctgctggcactgggcgccctgggcagccaggcccatctgacggtgaaggatgagaagaaccaccatgaactcgatcacagagagagagaatccagtgcgaataactctgtgtcaccctcggaaagcctccgggccagtgagaagcaccggggctctgcggactacagcatggaagccaagaagcggaaggtggaggagaaggacagcttgagccgatacgacagtgatggagacaagagtgatgatctggtggtggatgtttccaatgaggaccccgcaacgccccgggtcagcccggcacactcccctcctgaaaatgggctggacaaggcccgtagcctgaaaaaagatgcccccaccagccctgcctcggtggcctcttccagtagcacaccttcctccaagaccaaagaccttggtcataacgacaaatcctccacccctgggctcaagtccaacacaccaaccccaaggaacgacgccccaactccaggcaccagcacgaccccagggctcaggtcgatgccgggtaaacctccgggcatggacccgataggtataatggcctcggctctgcgcacgcccatctccatcaccagctcctatgcggcgcccttcgccatgatgagccaccatgagatgaacggctccctcaccagtcctggcgcctacgccggcctccacaacatcccaccccagatgagcgccgccgccgctgctgcagccgctgcctatggccgatcgccaatggtgagctttggagctgttggttttgaccctcaccccccgatgcgggccacaggcctcccctcaagcctggcctccattcctggaggaaaaccagcgtactcattccatgtgagtgctgatgggcagatgcagcccgtgcccttcccccacgacgccctggcaggccccggcatcccgaggcacgcccggcagatcaacacactcagccacgggggggtggtgtgtgccgtgaccatcagcaaccccagcaggcacgtctacacaggtggcaagggctgcgtgaagatctgggacatcagccagccaggcagcaagagccccatctcccagctggactgcctgaacagggacaattacatgcgctcctgcaagctgcaccctgatgggcgcacgctcatcgtgggcggcgagggcagcacgctcaccatctgggacctggcctcgcccacgccccgcatcaaggccgagctgacgtcctcggctcccgcctgttatgccctggccattagccctgacgccaaagtctgcttctcctgctgcagcgatgggaacattgctgtctgggacctgcacaaccagaccctggtcaggcagttccagggccacacagatggggccagctgcatagacatctcccatgatggcaccaaactgtggacagggggcctggacaacacggtgcgctcctgggacctgcgggagggccgacagctacagcagcatgacttcacttcccagatcttctcgctgggctactgccccactggggagtggctggctgtgggcatggagagcagcaacgtggaggtgctgcaccacaccaagcctcacaagtaccagctgcacctgcacgagagctgcgtgctctccctcaagttcgcctactgcggcaagtggttcgtgagcactgggaaagataaccttctcaacgcctggaggacgccttatggagccagcatatcccagtctaaagaatcctcgtctgtcttgagttgtgacatttcagcggatgacaaatacattgtaacaggctctggtgacaagaaggccacagtttatgaggtcatctactaaacaagaactccagcagg

SEQ ID NO: 210 - DNA, 2319 bp, Homo sapiens
atgtatccgcagggcagacatccggctccccatcaacccgggcagccgggatttaaattcacggtggctgagtcttgtgacaggatcaaagacgaattccagttcctgcaagctcagtatcacagcctcaaagtggagtacgacaagctggcaaacgagaagacggagatgcagcgccattatgtgatgtactatgagatgtcctatggcttgaacattgaaatgcacaagcagacagagattgcgaagagactgaacacaattttagcacagatcatgcctttcctgtcacaagagcaccagcagcaggtggcgcaggcagtggagcgcgccaagcaggtcaccatgacggagctgaacgccatcatcgggcagcagcagctccaggcgcagcacctctcccatgccacacacggccccccggtccagttgccaccccacccgtcaggtctccagcctccaggaatccccccagtgacagggagcagctccgggctgctggcactgggcgccctgggcagccaggcccatctgacggtgaaggatgagaagaaccaccatgaactcgatcacagagagagagaatccagtgcgaataactctgtgtcaccctcggaaagcctccgggccagtgagaagcaccggggctctgcggactacagcatggaagccaagaagcggaaggtggaggagaaggacagcttgagccgatacgacagtgatggagacaagagtgatgatctggtggtggatgtttccaatgaggaccccgcaacgccccgggtcagcccggcacactcccctcctgaaaatgggctggacaaggcccgtagcctgaaaaaagatgcccccaccagccctgcctcggtggcctcttccagtagcacaccttcctccaagaccaaagaccttggtcataacgacaaatcctccacccctgggctcaagtccaacacaccaaccccaaggaacgacgccccaactccaggcaccagcacgaccccagggctcaggtcgatgccgggtaaacctccgggcatggacccgataggtataatggcctcggctctgcgcacgcccatctccatcaccagctcctatgcggcgcccttcgccatgatgagccaccatgagatgaacggctccctcaccagtcctggcgcctacgccggcctccacaacatcccaccccagatgagcgccgccgccgctgctgcagccgctgcctatggccgatcgccaatggtgagctttggagctgttggttttgaccctcaccccccgatgcgggccacaggcctcccctcaagcctggcctccattcctggaggaaaaccagcgtactcattccatgtgagtgctgatgggcagatgcagcccgtgcccttcccccacgacgccctggcaggccccggcatcccgaggcacgcccggcagatcaacacactcagccacgggggggtggtgtgtgccgtgaccatcagcaaccccagcaggcacgtctacacaggtggcaagggctgcgtgaagatctgggacatcagccagccaggcagcaagagccccatctcccagctggactgcctgaacagggacaattacatgcgctcctgcaagctgcaccctgatgggcgcacgctcatcgtgggcggcgagggcagcacgctcaccatctgggacctggcctcgcccacgccccgcatcaaggccgagctgacgtcctcggctcccgcctgttatgccctggccattagccctgacgccaaagtctgcttctcctgctgcagcgatgggaacattgctgtctgggacctgcacaaccagaccctggtcaggcagttccagggccacacagatggggccagctgcatagacatctcccatgatggcaccaaactgtggacagggggcctggacaacacggtgcgctcctgggacctgcgggagggccgacagctacagcagcatgacttcacttcccagatcttctcgctgggctactgccccactggggagtggctggctgtgggcatggagagcagcaacgtggaggtgctgcaccacaccaagcctcacaagtaccagctgcacctgcacgagagctgcgtgctctccctcaagttcgcctactgcggcaagtggttcgtgagcactgggaaagataaccttctcaacgcctggaggacgccttatggagccagcatatcccagtctaaagaatcctcgtctgtcttgagttgtgacatttcagcggatgacaaatacattgtaacaggctctggtgacaagaaggccacagtttatgaggtcatctactaa

SEQ ID NO: 211 - DNA, 31527 bp, Mus musculus
tatcacctaaccatctctgccccagcaaacactggatcaaatcgacccctctgaatatactttatacttggagatcattgcagcttttcggaggggactaaatatatgagtcccagaaagggcagaggtaggcaggagcgactgtcagccttcctcttcatcagcccacccaggattgcacgggagggctggcacaagtcactgaccctgcgacagggtcgggagcttataccgcagagggtctcttttgtctggacgtcagggctttcctggaatgcaaacttctagtgtgcaatgtggggcagtcccaggggaagcaggctgcttggtcactgtgcatagccatgtcacctggtgaggtgagatcttgaaacagatttctggaaaagcgtcaagggtgctcatgaagcacgagtgttacgctctacgggtctggagaagcacttgcacacactcggggcagctacaccaagactgcggacacgtgctcatggtgcccaggcactcggagcgagttcgtgggggtgtgctttcaaagcaccaaggaccccatggactaaatttatggttgactgaggtggggttttaattggtgagctgtgaactggatgggaagaaagggggatcagagagcagtctgaagacagggtgtggggaggcttcccccacgagcaggctttgacagtcaggccattacagtcagcctctgtgtattgtgggtcagatatttatattacaaacctacatctatcgcttgtaggctccctctcccttctgctcctcttcactttctttccttgcaaggctgggaatggaagccagacctcacccaagccaggcaggtgctctatcactgagccatctccccggggcttttcagccactttatttccttggcgattatttggggctagcacgtaggtttccatggctttcctgcccaggtggcctgcagagaatcttacacagtgccatgcatggtctaagtgcctcaccaagggacccttgtcctgagatgggttttgtcctgtctccaccttgcatgtgctatgagcatgagcccaacaggttgggcaatctttccagccgcaccataagggcaagtcacatcaggaaatggcacacactgtctggggtacagccatactctggccagctatggtttgattctgagaacttgaagcacgtgggtttcccaagtacataggatcccaaggtgctgtaataaatcatatccctgagggtggagtcagggaagcttttgatctataaatcagatggaaatacaggtgccttcatctttttcatagggatttcggcctgggtaagctgagtgccaccccagcctctttcccttctgagcagtctggtctcacctgcttgttatccttgttgaatctgggccaggccggggagcaccacgttctgttctagctcggcctgtgggaggaaggggcctgtcaggagccccttgggccttcctgtatgggaactagctgttacaaacacattgccagccagcgaaggctcccaggatgacaatccctacgtaaaatgatgtgttagagagccacgtgatcttcagctcacagtctacatggagattgtgggtagattccctccacttcccctgccccattcatgtgtctgttgaatttgggtgctcagcactgaagtcagggccccatgcaggccattgcctgtgtggcgtttagagggtaattctgtggagttcagttctctttctccacctttgcatctgtctcaggcttgggaggcaagggctttctccatagagccacagggcgagcaccctgcattctttgtttctgaggagttttacacttataggaaagctgtgatgagggcatgggcagtttccatttctcgaggtgagttctgagggggcttcctgctgggtggggcccactacggtccatcagtttggtttttgtctgacttcccttttcagtggtaaagagtcacattgaaacgggctatgaggttatagcttctccaaccgaccctggtcctcacctgcatcccttcccctgcacgcacacaggcccatctgcagcctcttctaactgctaagcaatctctccagaccctaaacatattgtttctagcctgctgtgctgttacacatttgtagtcccaaatttggaagactgaggagaagccgtcttgaactacttcgtgagttcaaggccagcccgggttccataagaagactgtatcacaaattttacgtgtgcttttgaagagtggcactgagcacttagtgccacagatagccctctttgccagttactcggagtcatcatttctggcttctttgtgctttgggtttgaactgtgagttagagaggcgggcgggggggggggggagaatcccagctacctttcttttcccttcttcttcttcttcttcttcttcttcttcttcttcttcttcttcttcttcttcttcttcttcttcttcttcttcttcctcttcttcttcttcttcttcttcttttaattttgtgggttgtttgtttgtttcaagacagggtttctctgtgtagccctggctgccctggaactcactctgtagaccaggctggcctcaaactcagaaatctgcctgcctctgattcccaagtgctgggattaaaggcgtgcgccaccacgccaagctctacatctttcttagaagagaggaaagggcaagtactcttcttgcttgaggccagcagtgagttctggtgaccgtgaaggaaagagcaggtcttgaggctgatagagaagtctccttgctctctagcaccccaccacagcctctggccaacacagacaagctgagagtggtgtgtggggagactagagagcagtggggagagaagagaaagtggaaggctaggggaggagaaaatacctacctgacagacactggcattggggaagtaccgacacctgtctcagtggggaaagagatccgtgcctggcctaggtaggggctgtttttctagagtgcccaggttcaattcccagcacccacttagtggttcacaactcgtttcaaaggagccaagcacacacacacacacacacacacacacacacacacacgcagacaaaacacccacatacaaaacaacaaagacaatttttgtttgtgagacagggtctctctatgtagctctggctgtcctgaaactcgatatgtagaccaggctggcttcaaacctacagagacccaactgcctctgctaggattaaaggtgtgtgccaccatgccagctaaacaaatcaaaacaaactagagaggggccacagccgccctgtgctctgaccctgtggcagctgtggaaatgcaaacgcagaaagctcatagcatttaaagctggaagggtcatttaaggtcttccagattaaagcctttatttttgcagagcccagagatgggttgggccacacagctcctaattcccaggattgcagtccctgttcctgcaatttcacaatgccgccttctgaaagctctggacattcctgcaaacacattagctgcagcctacggtctgggctgctagaacaagacgcctggtaccaggtgattcatgcatttattcctcgctgttacagggctgagaaatctgatgctggcagaaacactcgaggactgccctccttgatgaccttaatgtgtcctcacaggatgcaagaggccaagcccttcatgccctaggagaacaaagccaaccacagggcacagcccttgagatctaattctcctaaggcccagccctgcaccttcacctcttgggggtgggggatgggtggcggcggtggcggcacgggggtggggtgggggtggggaccaggctttagcatgtagcgtgtgaatttggggtggagagacgcaatactcagaccatagcagcccctgtcatctgtgattagctttcatgttcttatccaattgaaatgattaatacttagagacagggcctggagaagtggctcagtagctaagagtgtttgctgctcttgcagaggatcagggtgtggttcctagcaccaaagttgagtggtcacagctgactgtaaccccagcttcaggggatctgacacactcttctggcctcaaagggcaccctcaaacatgtgcacacacacacacacacacacacacacacacacaatttgtaaaaatattttttaaagttatagtactataaataacataaaaacatgcatgatttgttgaaaagtctaagtttatccatgtgttgaacagaaaattgtttttcctcaatttgtattcttgtgtactgttatgccctgagttcacgggaaacccaggtgagcccaagaattgcaaagtccagcggggcgtggtggcgcacgcctttaatcccagcacttgggaggcagaggcaggcggatttctgagttcgaggccagcctggtctacagagtgagttctgggacagccggggctacacagagaaaccctgtctcaaaaaaacaaaaacaaaaccaaacaaccaaacaaacaaaaaaagaattgcaaagtccactgcaactcgcaaaagagtcttgtattttcaagtttgaactcggtttgcccacctagcacacactgcataaatgctggcaagcgatcctgagtccagaaaacattgggtttatatatagtataggaatagtgtgaatattcacagaacaggggagtagagggtggaatagtactgaagcgggaagggggctaatgggtgtctattcaaggactgtctgtgacctgacctctgtttaccttttactttttccatggtctcccttgagcttgttatttctctaaggtctcaaggacaggcacctagaaagttatcaggaggagtgttgggtgttggttttggacacacagaggtgcaccattctaactctaggggagggggagggagccagccccaggctgctgcaggaggatgtagcacagaaaccagctgtctgtgtatcatgcttgcggcaggctggaaaaatgatgggagcttctggcagaggggttggaggaaacgcaggggcaaactgtctgcacacaacaacactgaagtctctctagtatccttaatttgggggttgcaacagtacaagtctgaaactctccctgtttgaaacattgtggtactctgaccacacacagggttcccagcccagttctcatcttattcttccatagctgcctgccatctgccccgggctgcagtctgtgctgttggcagcatccacagagtccctgccactatcaatgtatctctccagcactcttttcttcgagttatttactgaacatatactgtgcattacacagttttgttttgtttttctttctttctttctttccccttcccattctccctcttgctctggccctgcttgcttcagcctataggttctttatttatttctcattatggatggttgtaagccaccatgtggctgctgggaattgaactcacgacctttaagagccactgagccatctcaccagcccttttacaggttttttttttttttttttttttttttttttttttaatgtttggaattgaaatagaatcccatggcttccccctccctggacccccttccttcccccctttcaattggtggactttttttttttattattattgttacacacatatatgtgtgtgtgcgcatgcacagatacatataaatgaatctgtttctgttgtctgtgtgtgtgtacagttccaaggacaaccacttggcattagacaaacaatccctgggagaggctacctctccttctggcagttgttagttgccttcgttctttgtctagaggaaaaaccctgacaacctttccttattccatgccagctcgtccgctgatatgacattgttcctgacttttcctccttatgcagccatttctagagcggctgttcacagcggatgccttggtcctctggctcctcagatctttcagctccctattcgtttgcttttcctgaaccatagacaaaggtgctgtgtgtccgtgtattccctgcagctgggctcctcatgacctgttgatttctgcattgtgtccagttgtggttttccgtgatgggctccatttgctgtgaagagaggccgctctgatgaggggtgggagctgcactgacccaggaaaggtaagctgagcacctactctaaatttttgagacagtgtgtcatgatgtcgtccgattcttaccaagaacctttccctttatttttctctttgtagaaatctttactaataacttcaaaacattgtcataaacccagatttcaaaccgccccaagtaatcctcaagatgactcactcacaaaatgtctgacccaacatcctcccaggccagtcttggagtctgcgggtggtgcagagctgctccttattacgcagtggcgtaccgccctctagtgggaagcttgtgtcagtacacagacgctcccggaggcgagcctggagattcttcagtgaacagagctaacgatgctagcctttagctaagagaaggaagacaaaaaagtagcaaagtcaggacaaaagccaggagcttgcccaggaagtgcactgtgggcccagggcacagtgcaaaaggtccctcccttgagatggcacacactgttaatggggactgacagcagaagcagattgggcaagaatagtgtgagccaggtcctgcaggagccagatggctgcccagagcagggtaggctcatctctccgctctcggttgattcctgccccacctcccatccccacccgatgaccccatactgaggactgaactcagggccttgtgtttgttggatgaactctataccgctgagaggaacccccaaagccaaccatttcccactttggtaattactgatttgtcctgtaaatcctcccccgccttttttattatggtggtcattgtggctgaacactctcacctagggcctctctctatactcccaggacagctcccccgagatacagctggcatggctgaatacttcagggatcatttggaatctctgtgtaagtcttaataacaggccttactgcatctttatttaacaaagctttttttttttttctgccttctctattgcaggacttacactggccacaagcagtttgatgttcagctagaaaacaatcacagatatcacgacagaattgatttacactgttctctgaacatcttggatgaggcccctcagagcagaggtgacaaggttggaattccgccttgcaggacaagttgtgtcctctggataaacataatagagggagcatgctgttgccttgagtaaaatcctgggcagaagcagctcaggaagaggtgggttcaactgtttcacagttcatcagccttggaaagcagagactttacagcctggcatggtgttgcatgccacaagcaggtggatctctgagtctgaggccagcctggtctacagagtgagttccaggacagccagggctatactgagaaaccctgtcatgaaaacaaaacaaaacaaaaccaaaaagaaacttgatgcttctggtcactttgcacctgcagccaggaaacaggaagagataaacaaatgtgtgtgcttacctagccttctcttttttatgtagtcctagactggtggtttgcatgagaatggtccccagaggctcatatatttgaatgcttggtccctacttggtaggtctgttctgggaagttattaggaagtgtagccttgttggaggtgtgccactaagggtgggctttggggttttaaaagcccatgccaggaagagtctccctctctctcccttctctctgtgctctgtggttcacatctcaatctggaagctctcagctacggttccagtgctatcacgcctgcctgccaccatgtttcctgacatgaggataataaaggactcactctctgaaactgtaagcccccaatttaaatgctttcttttgtaagttggcttggccatagtgtttcttcgcagcaacagaaaagaaactaagcaaggaccaaagaacattgttgcccacttttagggtgtgtcttttccattcgattaatttaacataaaccctcacaggcatgctcggaggctgacctaatctacgctgtctctacaagtgtacccaaaggcttgaccccctaggtgattctacatcctgtcaatcaacagtaaccaaggtggggtaaggcacgaggtagggatgcaagtggaacttctaacaactggaaggacaagtaccaagttagtcttgagaagctgagaaagtgtgttgtgtttggagcgaagagtaagagctctttgtctagaaagaagatgaaaggttgtgtgtgaagcaggctggtcaacaaactcaacataagcatcagtacacccatcacatacacaccacacgcctatacaccacatatcacaaacacaccacacacacaacatgctacacatatcacatacaacactctacacatcataaacaacacacacagcacacacacacacaacatactacacacattacatacgacacacacacacaaacataccacacatatcacatacgacacacacacaaacataccacacacatcacatatgacacacacacaccatataaatgacctcaggcatttgtagctccttatataatttctgagacctaaattaatcctacccctttgaggtgtgacaatgtccttgaatgctaatttaaaagttctcctggctggcaattccaattagcttatactaaattcagcgcacaaaatacatttatttttaacataaggaggcttctaattcttattaataggacattgggttctttttcaatcacagcatgaacagatattttaagaacaatgacccatttatgcagcagattattagctttctggtaatgcacattaccccccacctgctctggatggaagcctttagctccccttccccaagtcaaagcggggccatgtcactggctatgtgagctcaagtcagcaaactgcatgcagctcccggattggctattagggaacacctttttttttttttttttcctaacacacttttttggtagatgtcttagaagtacaatttggcagtgtggtgactctgttctgaatgcttccatactcagtccctaagctttggatacgtttctatgttcaacaggtctctcagtttaatgttcagagatctagactatgctaactgtgctcagaaaacacatgtcaactctgcgttattactatgaatatcctttattcttattattttttaattagttctcttctgggcagttgggcctagtttctctctctctgtctctctctctctctgggcgtggggtgtctttctcgcgggtgggggtaaggcagggaccctctacaaagctctggatgtcctcaagctcacagagatctgcctgagcgcgccaccaagccgggctggaacagggattctggctctctaggtgtgaggactataaagtgctcggtgcactcaccgcaccctcagggtcatcaaatcctcaacacacaagggcttaggttcaggacccgagtgcagaggagtcggaaaagggtggggtcaaagtggaaaggtcaaaaggccagtgtctccagtccagagcctcggacatccgttaccatagcgacttcagccaaggaatggaattaccgaggccccaacaggctttgcgatcccaaatcccaggggttttcggcgcggctcgtattccgtagagcagctagacgcagacaccaacgccgacgcggttgcctagcgacacgcattttcccaggatgcctagcagtgttgtgttttctcagccaatcagagttgagatgcaccttcgctgtggaccaatagaatgcgaggccgaagcccgcgacggttgacccggtggccggttgctcgccgactcaggcaggcagacgaggggctcgggtttcggcgcggttggcctgcagcgggcgagcctgggctccgagcggcgcggtggtgtggttgccagggtggccgctcgccatgccgtcccgggtggaggactacgaggtgctgcacagcatcggcaccggctcctacggccgctgtcagaagattcggaggaagagcgacggcaaggtgaggcaccgggcagcccttccacggcgggcttagggagaagcaagcgtcgcccacgctggggaggggcagggcggccacctgaactctcgtgaaggaccgggctgtagcctcctaagaagggacgggctcgtggagcgggcagccacggctgggaaccggtggaggcgcgaatccgcggcgagcagaaagacgagctcacgtgacctgcttcgccgctgcgccacacgccgtcccggactcaagcgctggggatggtaccgcccacatttcgggtgggtcttcccactaaattaacccggtctcgactccctcactgacacacccattgagttgttagtgttttgtttttcaactttggaaatttcaccctttgtctcacaccttggaaatgttgtatttcagatcctggtgtggaaagagcttgactatggctccatgacggaggtggagaagcagatgcttgtgtctgaagtgaacttgcttcgggagctgaaacatccaaacatcgtccgttactatgatcgcattattgaccgaaccaacacaaccctgtacatcgtaatggaatactgtgagggaggggacctggctagtgtcatttcaaaggggaccaaggataggtaaggtgaaagagccccacggttcgtatctaataataattaacttccatgtttgtacgctctgaatgacttgccccagattgaagatggcttttattcagggttgtgaaatgtgctttttctccagacagtacttggaagaagagtttgtccttcgagtgatgactcagttgacgctggccctgaaagagtgtcacagaaggagcgatggtggccacactgtgcttcaccgggacctgaagccagccaatgtcttcctggacagcaaacacaatgtcaagctgggggactttggactagctagaatattaaatcacgacacgagttttgcaaaaacgtttgttggcacaccctattacatgtctcctgtgagtattttagaattcaacttttttttttccctgagacaggatttctctgtgtagccctgactgtcctggaactcactttgtagaccaggctgtccttgaactcaaagtgatcctcctgcctctgcctcccaaatgccgggattaagggtgtgagctaccacacctggcctagaattcaactttttaatatcttaggtgaagcattcagatgcaaagaactgaggcttgggttgctagtaaatccagtagctcagaattcacaatacaatttaagtttgagtttgactttgttcccctaatgttggggattgaacctaggccctcaggcatttgaggtaagcactatgccactgagttacaccccaaagtcttttatatgtattatgtatttaaaaatgtttattatttatgtatatatagtatatgtgtcttgtgagtgagtgctatgtgtgtggtgagaccagaagagggagtggacttaccctatcccacacactcacgctcagggttccaggcaactgtgagccgtctgaccagatgctggaacttgaactcaggacccccgggaagagcagcaggtgcttaatcgctgacccctcctagatttgttttcaaagagacttcctggcaaacagttctctgtattcaactagagctttcaaaagaaaaagaaaactaaggacttatttatgtgtatgggtgtttggtctacatgtatgtaagtgtgccacctgtgtgccaaatgcccaagggggtcagaagacagcattggactctttggagctagagttatggatggattgagagactggaaaccatatccaagtcttctgtaagagcaacaagtgctgttaaccactaagccatcttcagtgtcccccattccccaatgtcccccatcccccagagtttcactgtagttctggctagcctggaattcacaaagatctgcctgccgctgctgggattagaggtgtgaaccatgttgctcagcttttgttttgttcttcaataaccacaaaatgctaaattatagggttacaaataatgtttaaggcaacaatgtttccaaggggaatagtgtttgtttgttttgttgttttttgttttttcaagacagggtttctctgtgtaaccctggctgtcctggaactcactctgtagaccacgctggccttgaactcagaaatccgcctgcctctgcctcctgagtgctgggattaaaggcgtgagccaccactgctcagctgggaatagtgtttaaaggcaacaatatttccgaagatgtcagtcctaaagtggtgacttcagactccctgggagtgtttattttatttttttaacatacggagtcctggacccaaagttaaagcaccgctggtcacgctgtctcagcaggcagctgaggtgaactgagatgctcaggtacttgctgctgctcatgagtttaggacccagacccagggaatggtgcctccacatttagagtgagtctccccagctgagctaagtctagattcccttagtgatatacacagagacttgtgtcctaggtgattttagatgctgttaggtggacagatttagcattacagtaactgaaagtttggtgaggctcaggtcttctcacagagggatccagtgttttagtgttaatttctgcatgtcctgtccttgctgctcttctgcatttacagggtgttcccaaatgtctcactatcataaggcaccctaggtgcatagccttgtatgaattagtcctcatttctgattattagattgtagaacaattgttagggcaaaaacatgacaggtttttaatctgtcattagatgtcaaggtcagggcctgctttttatcccagtctgatttgcatagtgagatcctgtctcaaaaaacagaagcaaagcacaagtaaataccaaccagccctcaagtctgtaaggggcagcacacacacacacacacacacacacacacacacatcctccgtccactgttataaaagcacagcagtatctaacactctccttacttctcccagctgatgtctcagggaaactgagcccattcaggcgctagggcagtggagggcagtggggaaggaggcaggaaaggccgtgcaggggttaacatctgggtgatttcctttgtacttaagcgttctgtgtgcaacatgacaccatggaaaaccgcccagctctgaaaatagtcacaagttcactaagttttatactgtcaccaggtctattagtttgattatttatctggaaagttctagaaatctctgtgaactactgaagaatcctctatatgacagtaactcatgtacccaagcttcctagaacttgtatagctgagaacaactttggatttctttttagaagattttatgtatttttatgtgtataagtatttttcctgaatgtatgtacaccatgtgtattcagtgcctgggagagcacagggcattggatcccctggagctagagttatagactgtaatgagtggccgtgtgggtgctgggagagaagcctgggccctctgcaggaggaccaccttggctgctgagatgtgtctctagctctagcccgccatcgttttctggtcctcatgctctatctcccaagtgctgagatgacaagtgtgagccatggttactttttttgagatccagccctgggctttgtgcctgctaggcaggccctctgctgaccaggctgcattccagccctcaggttgaaacaaagcaagctctcacctccttggtattttcttaccttctcctttaggaacagatgagctgcttatcctacaacgagaagtcggacatctggtccttgggctgcctgctgtatgagctgtgtgcactaatgtgagtgcgtggagacaggcctgcttcaggcaaacactctgggtcctgttacaatagcaacaaccaaacacctggcttgtacaaatttagaatggaacatgtgggactgggtcctgcttttttgttcagggatctgtgtttgcagtgggagggcagtttatagaccaggccaacaaagcagatgcgtcagggtcctggggaaggtctggggttgggagaacaggacgggctctgagtttgacactttcctcctgcgattctaagccattccccagaaccacagttgaacagggatggaggaaaggcactccatcacactggagacagtttgggctgtccttccagatctagcaggcagaagccacgctgctgcagaatgtccagagcgtatggacacaccccgagtcagagctgttcaaccctaaaatacagcagcaccgccttgccacagtacggtgggtgatgctgctaaccaccccgctaaccatagccagggaagagtcccagatgaggaagtagagtgtgagacagaggccggtcacccatttattcctgtcctttgtgtttatctgacatttttataacttctccccttctctctttctcgtccctcctttttctttccttttctctcttttttttcttttttaaatcctaggcctccctttacagctttcaaccaaaaagagctagctgggaaaatcagggaagggaggttcaggcgcatcccctaccgctactctgatggcttgaatgacctcatcactcggatgctgaatttaaaggtaatggttgcaaggcaccatgtgacagacatgacatgacagagactgagaggcgtattctgtgtaaagaccaatgaaacctaaaggagcatcggtttccctggctacagtcctattggcacaggtgggcggatgctcacaggcatggagacatgccccctcggcaaccgtgagcctcacttgcagatttcctttccatcttctgctacagtgaaggatggttagtggtatggaaggactgaggaaaggccaatttcagccctatagtgggaagggaaggagccaggatgcactgtgttcctctcccctcaccatgagggatgatggattatgaagggaaggtcaacagggaaagaaaagatcctgaaatggtcttctagctggtgggtggcctttgtcagctgaggaaagagtgaatccgggagctgtgggtttgtggaggatgcaggggcagggatggggaacaggtaagatggaaggtcatgaggatgtccttcttggtatttagagaaacaggtctcacttccccagagcagcccagtgatgcccagtgatgcccagtatgcatggaggagggaggagttgtgcccgcctgagccagctccttagaaccagagagaagggagaaacaggcagccaaactcaggtcatggtgcagacccagcaccttgtgaccagtgcacttgctttttcaacctgatatctctagatgcaggaactgtcttttgtcttgtttaccctgctaatgtagctgcttttcttaagatgaatctgatctgccagccacactgtttctctaggactaccatcgaccttcagtggaagaaattctggagagccctttgatagcagacatggttgcagaagagcaaaggagaaatctggagaggagaggacggcgctcaggcgagccttcgaagctgccggactccagccctgtgctgagcgagctcaagttgaaggaaaggcaactgcaggatcgagagcaagcactcagagctcgggaggacattctggagcgtgagtggtgccccgagccagggagtcagccgggcgcagtggggagatgggaccagggtctaaacagaagagcgtatattcacaggctgttagaaagagcctttatttctttttagttgtgggttctggggattgaacccaggatcttatgaatgccagtgagctacatcccagcatttttctctcaaggcaggatctctctaagttacccatgttgaccttccatcctcctgctccagcggcttgtgttaccaagcctgacaacttttataaaccagtgattctcagtctgtgggttgtgacccctttgggaggctcaaatgacccttacctaagaccaacagaaaacatttatttcccatgagtctccactcctttgtccatctccaggtggtacacacacatgcagatacacccaggcatggtaacatcatgacaactctatcacatataccctgaacaaatatatatatataaataaaacttcattagaaatattccattagaaaaccatcccaacaacaacaaaaagtaaggagaaagaagcattgtaagttctgtcagttttgtaacggtgagcacttaaaatagtcggtgctccagacagagctccgccatgtcttacggaagttaaatggctgtcagagggaaagggttttaaatgagtttttgagcttcacgatgaactcagaatgttcttagatagcaaggctgctaagttctaagcacttttcagtaatgaaagtgagttgcagacagtaacttacttggttgtaatctttgtcatcttgaatgagttacatttatgactgcaaggaccaaatacaacattcttcagtttatgtcaaaggatccgattattccaaatgaaacttcagctttggcaaaaacccaaaaaggatgaaaataaaatttacatgctgcctaccttatatgcttttttttgaggaccatgacattgaaccagacaaaaggattacaaagatagtttctgtgtgagaacacttgcacatgcttgcagacaagacatttcattgtattttccaagtctacatgatgcctgccccatttgcattgccagaagtccgttcattcagtcagagctgaagctcttcgtgagacagcacaagaggagttgactgaacttgctaacggcgctgcagtgagagccgacttctccacagtgccccagctacacaactctggatcaagtgtttgcagctgtacctgctgtagtctttaattttttaaccctgtttttaataatggttctcaagtgctttaaactgccttctccagcccaccacccaccagaggtagtggaaaaggaaggtattagggtacaggggcagtggacctgtttagcaattgttttttggagcaaatctcatttgtgttgtcaagaagtcagcagttgaatcatcagtggtggggctcttaatgcactggcagaccgtcagtctggtcctgttgggatagcagcaggatccagcagcagtggcaccgagcagagacgtgtgcccttgcatagactgccctgagaatttctgatctggtgagaaagcaccaacctccacttttgcattaaagtttgtttttactagtactgtcgcaaaatgtagcaccatgcttcaagacaaaactacatttatttgtaattaggagtaaatatttcacaatatataactaagtatatttttatgactaatcactgagctttaattatgttcaatttgtaacaatgaaaatagatcctgcatatcagatacttatgatttgtaacagtagcaaagttatagttagaaagtagcaacaaaaatagtgttatggttggtgtcaccacagcatgaggaagtgtactaaagtaccccagcattgggaaggctgagagcactgcagtgcagggaccttcccagcctgcaggtggcaggaagagagaaagataggatggccaggctgcagtagataggtttatggtcagagctccttactcattggtttcctttttcatccccttttccaagagaaggaacgtgaactttgtattcgagagagacttgcagaggacaaactggccagagccgagagcctgatgaagaactacagcctgctgaaggagcacaggctcctatgtctggctggtggcccaggtatgcccatgaactgcacacagctccacctcacatgaggatgtgcaccacagtgtggcccctgagtgggttagagccccagatttcaggatgacgtcattgagtctgtgctcctgagtggactgaggctctgctggtgcagtgactgagtccctggccgagagacctgataggaatggcaatttcatttcagcttcactcagcataccaaaagcggtggatggtatttaaatatttgagttttgaaatggaaacattttcaaaactatacatttcaagtttttcacaggtattatgttctttggctattgtggtttgaatagctacagcccccatagactcatgtgtttgaatgtttggcctatagagagtagcactatcaggaagtgtgaccttgttggaggaagtgtgtcactgtggggggcagattttgaagtctcctatgcccactgtggaagaaagtccctccttgctatctatggtcaagatggagaactctcagctcctcctccagtaccctgcctgcctgctgctgccatacctcccacgacgatgataatgatggactaaatctctatacctgtaagccagccccaagttaaataccctttgtaagcgtcgccgttgtcatagtgtctcttcccagcaatgaaaccctaagacagttatgtgaccaaaactatatttctctatattttcaagcaaaaatcctggtattttaaaactgtcacacctcagtcatagtaggaactgtggcttaacagccatggtagtataagtctgttatcccagcacttgatttgctgtgagtttgagaccagcctattagacatagtgagttcaagacagtccaaaagaaaggggatggcacttggctagagagatagctcgtcatttaagagcacacactgcttgtcttagtcactgctctattgctgtgaggatgcaccatgaccccggcaattcttaaaagagaaagcatttatctggggctggcttacaatttcagaggttcagtccatgaccatcatggtggggagcacggtggcgggggcagtgctgatgaagtcgctgagagctacatctccatctgctgggatttcctccagcaaggccatacctcttcctccttttcaatcagtgccaatgcctggtgactgagcattcaaatatatgagcctatgaggccattatttaagccaccaccctgttcttcctgaggacaagcagcagcattggagttaagacttcatgaattatagctactgggtaaatgtaaaatcatgtactatgaaatcaactactgcaatatacacgagtgcaccctcccacccaccatgggaacctaatctggatgctggtcagtcctttttaaatcagctgtgactgatgtcagtactgtgatagtaacagccagtgtgagtccctcctgcccggcacacacacacacacacacacacacacacacacacacacacacacagccctcctgcctgcaactccagctccgaggagtccctgatcacttgtcccagagagcatctcacaggaatcagtggataggtcagctctttgatctgtgtgatgtagttgatctcaggtaactcagatccttttctttctctttgtaaagaacttgatcttccatcctcagccatgaagaagaaggttcatttccacggggaaagcaaagagaacaccgcaaggagtgagaattctgagagctaccttgccaagtccaagtgcagggacctgaagaagaggcttcatgctgcccagctgcgggctcaagccctggctgatattgaaaaaaactaccagctaaagagcaggcagatcctgggcatgcgctaggccggcaaggcatggagctgggtcagtgttgatactgacaacccactagagattggtattcagctgctgtcgttttgtgtgtctggttctgtgggcaggaacctttgtgtgtggtgagctcgtggcattgcttgtggtctgcaaatggatgtgtgtgtctgcttcctaatgtccctgtgtgaaaagcaagctgtctttgctggttggttgggcttttgatcctgtgtgtgattactacttggaatatgagatggggcactatagatactatagatcttaggagaaaataatgttagggaaagaatatttaacctggagggctcagagaggctcacacgctgagtgataccgccttcactgtggtttccaagtgaggcctcagcgggtccatgacctcactgctaacgggatgcgtatggcagggcccacagggttgcatgtcagaggtgttgtaatgttacagggagagacccagcctctggcctgacctcctgatgagaagccactcaccagcattcccattccaggacgctcactgtgccagttaacatcagattagaagtggaggggaggggagggcgagggctgaagcttttaggatttgccttagggaagcgcgtgccatggccctcagcacgctgctgtcctgcatcctaggcaggcactggggacaggaggctctgggagccctgagagccccctcctgctgtgtgcagggcctgtccccgtctgtctgtatctgacctctaggtcagttgatgacattagttaagtgtttctgtacctacaagtataagccaaaaggtcggaaatgcctcagagtcacacatgtggtccccaaacatttaatttctgaagagaactgtcttcagaaagttggtctatttaaggtgactggggaaaaggcaggtttcctttgctctctgtccacagtcccttgagatggcttcagaagagaacagtgttcagtgtgcgttattgagggccctgtatgccttcacctgtgtgagggccagattgctgtttgtctacggtttcttgaagacctcagctcagcagaaaggagttcatttgccctaacaagtactgttggctgagaggggaggtcagaagcatgtaatgccattcgtttcatggctaaacacacagactccttgcattttaaaattctgtgcctttacttcctggagctataataacgtgcttgggtgtgtgacttgccgaggttggctttcgcaatgctttatgtaaactctgctgttggcacttgcagctgtagaagctgtcggagggattacttacttacggttatagcatctggggtctcttgcagctgcaatgcctgggatcttttgcaactctgactttttcagtagcagcttggaatgttaaaatatggtgagcctcttctctgtgaaggaagggcctgacaatctgccagcagggaaaagactgggaactcagtgcagtggttttcctgcctttcccttctcctttggtctatagtgatactgacagcaatacaaagtaaaatctgtgtatataaaaatcctaagtatgaggtcttaaatgttctggaattttagaaaaaacttaattggatgcaattgtttataattaacaagtcatcttatttataaattttccaatataatataaatctattttgtggaaatttatcactgtgatgtttgtattctctgtgtgtgtgcacacatgtgtacaaattcacgtgtgtgtgtgcaggtgcaggtagcatagcacctagagggcaacctcagatgtcattgttcaggaaccgtccaccttgagttttgataaggattctccctggtacaggatacaacagttttgccaagcttgctgtctcctaagtcccagggtacttccctctgcctccgcctccctaatgctgaggttacaagcacattttatattacctaacttttttttttaaagatttatttattattatatctaagtacactgtcttcagatgtaccagaagagggcgtcagatctcatcacggatggttgttagccaccatgtggttgctgggatttgaactcaggaccttcggaagagcagtaggtgctcttaaccactgagccatctctccagccccagcacctaattttttatatggttctgggccctgaattaagcgcgccccccccccccccccatgcttgcatagcaagtacctttctggctgagtcatgtccttagcccatgatgcaatttgtttttattccggatgtcatttgtgttccatttttctacagttatgtattcattccactgtaggctgtagtggaacgtactctgatcatggaggctagcactgcagagacgatcgaggagcactaggcaatgttgagaaacattccttgttctgctttgtttttccaagacagggcttccctatgtagccctggctgtcccggttctcagtctgtatagaccaggctggcctcaaagttagagatctgcctgcctctgcttcgtgtgctggggttaattaaagggccaggactctggttcaagaagaggagggaagtgttttctctacagcctccctgattcgtgttacttgctgttaaatgtccttagaaacattggggaactgttagcatgagttttatcatttgtcttcattctgggcaatgtcagttttaagtggaaatgctttgggcttgatcctgtgtggttggactgcacagctcactcactctggttcattcctggagagtgcctcaagcaaggcaggagagactgcactcagccttcaacaatgtgtgcacgtgtgcgtgcgtgtgcgtggacagctggaggaggacctgtgacttactctcccttccccagccctgtgcagtgcaatatcaggactcaggtctagcctaccaccctgctttcttaggtctgctgtcacatggattgtgactagccctgttctgagatgcctaacacctgttcccaggcccctgctgagtgtccttataagaagttagaaactataaccgaaggtgtaataccttccacgacagcagtctgcagtctcagtcacccataaaacttcattttgaagtctggagccagctagacgtggctatatctatctcagactaaccttaattcatgtactgtcaatggacagtcattgagggcctaccatgttaaaacctgacattaacccattaccctggagagcccgaagtctccggcattagatctgtggggtcaggcaatggggagcaaaataaagctggttaaaagagctaggaaatagttgtgtgtgaaccctttttggaaaaggggacattggggttcaagttaggaagaacagcaggtagggggaccctgtggggtagggcaggaggaagggggcttgcagggcagggagaagaagatccttgaaagcgtggaggcacacagccgacttttgcgtcctgccactgaggcgtcgacgcaagccagttccggtccatcgggaccgtatgctggaccagagaggaagctctttgaaggaaggggctgctctgagaggcgattcttctcattaggctttcagcaggttcaccagcgcctcagcaatggtagaaagtggcctcacggtggcgccaaggcgccgcgagtccagcagctgggaggccatggcccagctgagcaccaccagctcagttactttctgtcttaacacccctgcgaagaggtgtcagaaaaaccgaggcacacaggtcgcagatgagtggcacagctggtgacggactcccaagtcaccttggcttggtgaaggatcaggctcccaggaaggaagcgccctgcctgctcctctgcctcccagcatagcagcgacctctttcccacagtgggtgttgaagctttcaattcaaagggtcaagagatgtttattctggagccaaaaatgagtgactgtggcccaggcacacagattcaggttaccccaaaaaccatgttccagcgagctgacaatttcatggagtttttatagtaacaaagtcaggtgcatggaccatggcagggagcccctgctatagccctcagatgccctctgagagtctcagagttggggctggaagaaaatagagctagatgttcacaccaataggtcccacacagaagtgggcaacatgtggctgtctactgggttaaaatggcccaagaccattttgctctggacctgcaacattccaacgctccacaacccctgcctttctgatcacattcagcctggtcggtagcaggctaccacagtgtgacttcttcccagagcttagcgtgggttaaggtgaacgcccaccctgagcattgcctgttgcttgtggttccagcgctgtagtggctgaggcaagataattaggatataaggttatccgcagctccgtagccagtgtgaggccagcctgggctacacagtgtgaagccagcctgggctacatgagaccctacctcagaaaaacaaaaaacaaaataaacctttaaaaatcggtaacaataaacccccaaaccgccgggcgtggtggcgcacgcctttaatcccagcactcgggaggcagaggcaggcggatttctgagttctaggccagcctggtctacagagtgagttccaggacagccagggctgcacagagaaaccctgtctcgaaaaaccaaaaataaataataaaataaaaagcagaagagtttttaaaaaaaaaacaaaaaaacaaaaaaaccccaacccaagacaactgggcagtttagcaagatgggccagagtggtgtgatagagtcaggtggcccttagacctggcgctgaaagaggtgactgggcaggtttaggtagggtagagtagatttagctgctggttttaaagcaagaccccgggaggatgggtctagaatgatttttcttcctccagctttcctcgatgttgtctgccatatggaggcccgggccagatgcctgagacacccaggctgctcagggcccttccctgaagtctgtcccacttacagacaggtcttgttgtgagaccaaaggcaaggctcccaactggattgggctttgaaaggaatgaagagaatgcgaggtgtaccaggagtgctcagtgacttggaaaatgaggacccgcattgatgggtggatttctcagaaagatgttgaaatcagtctcaccccagggaggttcatgctggctgatggcctgcaaatggacctaggctgttcttacccttttcccatccagaacttatctttcccaagtgccagggttcctctaccaccagctgaatgtagtcagagccacgggcatctgtgcaaaacctcaggccagaacacctctgacccatgcatccctctgcttcctctcagcagccaattgaccttttgtttgaagacaatgtccaagtggctgctgggctgactctgcaagtggagatgccctgggggtggggggcacccagcagctacccaggctggttcattgtctaaccctctgagactcagttcctcaccggtaaacagaacattagtcctggaaaaggtgaactgtgtttaagggcctagaccagtcctgagcaaatgtattccatgtggccctgaggaggatccaaaagggcttgggttataatggatgggctctaataaaatgcaaatatttaaactaagggggggggagcatgagtgaaaccaagaataaatccaacataattgcagtaattacacccggagccaagccttgagggagcagagcattcactgaggtaaggcaggagagacatctcagggtgtggcataggcctttgctgaacctccgcctgcaatggaccgggcagtattgtctggacatcttgttaaaatatagattcaattcaacagatgcagggtgggccagataatctgtcctaactgctctagggtagactgctcgctgtttggtaatttcccaactgtacaggaggggctgagagcccaccaggctcagggagctgtgcaaagcaggtggttgaacaggggacaaagtagacccctattggctgctgtctctgccccagactgaagtcccatgtgatcacaagctgaattaatagagaagaaaggctttagaaggcttttcatgcccagatcccatttatcactctagtatatgggagagcatgatttgacacccccagagcccttggcatcctgtgatacaggagaactagagagccctcctgctctctgtatctgcctggaaggggtttctggggcaaatctgcctgggcaggagagggccatatatgggtcaggggccaagtgggccccaaccatgtttccaggatcgatcagaggaagtggccagtaggttgtctaaagcaaagtgacactcaccctccatgccagcaacagatgtcctcaaggtgcccaggacagactggtctagggcagcccatggaccagccagactcagagcatggagctgtgagccagccaggggcatagttcacctatggcaactttcgtgatgacacctactagggggacctgggagggaaaatggctcattaaagttgaactttggagttaactgaacatttaaaccagttaattaacaagcaaggactgtttccctcacaaaccaggtagagatggtgggaacagctgtcattgctccctgggtagaacagatacgtttcagcagaggcaacccaatctatagaggctgtcctcacagccactgcacgaagctcagccccacgctgcctcaatggatcaaagatgcaagaacaggagactggatttactaatgtggggagcactgggggttcccttagaaaggagaaaacagcagtatccaggagaggcagaaacattccagctggccgaggggaagggctatgagatgggctaagggaagcagggatgtggctcagtggttgagtgttttagtagcctactggaatccctgggtttgatccttaacaacacacacacacacacttcaagttcatgtccccagtgacctaacttccttccactccttcctttttgtttgcttatcttttgagacagggtttctctgggtagccctggctgtgctggaagttgttctgtagaccaggctggcccagaactcacagagatcttcctgcctctgcctccccaatgctgggattaaaggcatcccacccaccaccctttaataataccatgatctgggggcttggagagatggctcagtggttaagagcactgactgctcttccagaggtcctgagttcaattcccagcaaccacatggtggctcacaaccatctgtaatggatctgatgccctcttctggtgtgtctgaagacagctacagtgtactcacaaaaagtaaataaataatcatcatagtgatgatgacgataataataataataatacaatgagcagggaggaagcctttagcacatgagccttaagggaattgttcaggtgcaaactgaagcaatggcttgagagtgttcaaagcacttgtaatttctcaatgtgctgttctgttcttggccctggggagacagaccagtaatggagcctgtcagtgtgggggctgtagagcatcctggggagggctagctgccctgggtattggggatgctgttttcagggacctatattcttttgctctcttctcccggcccctcccccaatacaaattgtaagcgacgcacacatgcatgttgacatgtctgcccttgaaacatgctgtgcaagaggacaggaggtatcgggtgctggaaacgggacagcttggaacgctctggagtctcttgtgagggtgtggcttaattaggacgaccttcaggtgtcctgctgtagatttgctgtggcagtggttagctcttactttgcagtagggacttaggggtgtgggagggctacaaaagtcacacagagccagagagcccggcacctgaaaagcagtcactctgaggctcctggctgttctcctccatcacacagggcaggattaattattaatgtttacgatcccatagaagctggtctctgtgaaccacaagcctaacacttcttttccaacctccaaccacttaatcatggttttggctgggtcagcgtaacagccccataacctcggaaacagagtgctgtgaagtcctttatctgctgttcctgggggcaagggccaagttcactgggtgcagctggcggcatgggagctgataatgctctcgaagaaacccagatgtctttgttgcctttcagagctgggcctcatcacgcccctttcccggtgtgagtcttcccttcccttcttgttgcttagctgcggtcggcagagccttttcacacacacagtctcagtagctccctaacaaggctgcaacaggcctagacgaattctgttctcatacagaaaataaagatgcagagagctaagatcactgacacccaagaactccaggcatcccagtgttaaggcaggacgctggtttacagactttagtgtgctcgggactgtccatgacttccttgaaagggtcagtgggtggatttttctggtagcctacagacttcatcagactcttcacatctgagtcaggagaagtggttgctttcaaatcagcacaaagacttaccatgcctaccgatggtgccacctgctgggttctcagattggatggtagagtcatggccaagggtgtggccaccctggggaccttgctgctcttgaccatggaagactccagacggcaagcagcaagcctggagacctgaagttgaccccacactgtctttggggagcacaggcggcttccatggcagagagagatacacatatgacaccaccacaggtttgttagatcacaaggaattaaccactctgaaatgagaagtagccatactttcatagcacgcctgcaccatgctaacccatccattgtgttgcaaaaaagattcccctgacagtgacaactcagacgagtgaagatgtagggagtgtgaagcactcacaaaatccacattcaactgactgtagagcacatcatggtgtattcattaatactgaaatatccagtttgtcttgtctgtgtctgcatgtgtgtgtgtgtgtgtgcacacgtttgtgtatgtgtgtgtgcaagagtgtgcgtgtgcctgctcgtgtgtgtgtgtctttgtgtgtgcatgagtgtgtgtgtctgtgtgtgtgcatatgtctgtgtgcatgcacatatgtgtttgtgcgtgtgtgtatgtgtgtgtgtttatgtgtgtctgtgtaattagggcagaaaagtgccattcagcagtagagtgctctcctagcacacatacagacttgggctccatctcccaagcctgtgcagcatggcttacaactggtggctgcttggagcaggccccttttcaggctctgcctggggctaatctggagacaggtggggatggcttgctgcaaaccagctaaagtgacagtgttaccattccagggctcgaggaaactgtgagagtccaaagtctccggtgtcacgagccctgatgtcaaagattccctcagccagagcccagcttcccagaaacctcccaaacaatcagcgataggcaaattagctacaagaagctggctggcagccagcttggggctggatgccaggcctgagtggaatggacccaggagacttctgcccccggtggcctatgaggtcagctcctctcctcagcagatgctacacaaagtgtaggcacaggtagctagatcacttgaggctagccaaggctgctcagggataagctgggctgaacaagctatgcctcagcctggggcaggtccccagcaccttggcctccgaggacgcccagtacaagcttggtacatcctctgacatttagacagcagaactcacacaaggcaccttatatggccatgtggggcagcgagtgacctctctacatgccgccctgttttcactctgggctgtggtttatgagggagcatgtgaggacagcctctcaggtgggaagacagtggaggaagccacagggcagccagtggactttgagctggggctgtgtctcaggtgtaggtgcctagtctctcatcttccccataggggctgaggtttcctctagtctgtagttgaggaaacaggcttagagtcaaccagttaaaccctggctgggacgtttcgagctgaaggtagtaagactcgaagccacatgtatgagccacatgttaggctgcttgcccggctctctgtcattatgggacagttgtcacggatctgccactgaaaccccaggccagttcttgggcccagtgtcccccatcacccctgtcttgcttctttaagcacattcccagggcctctctgttctctcaggagttggtctttgagaacatggccatagccctcttgagcaggggtggcatatgacttgtccacaacacagactctccgagcccacacccacctagaaaaccaggtggatttggaagtcagcgtttaagaggaagagcttgtggggctagggctcagttggtagagtgtttgcttaacaaacacacggctccccagcatgatgtaaatcaggtgtccatgtggaacacgtgtctgtaatcccagcacgcaggaggctgaggcaggaggattggaagtctgtaggagtgacgataactaaggactcctcgccattctcttgcttccctgggcaccacctgagctggagggaggtcaggcttgacctttcatctccttgtgactttctgagccagttttccaagccactctcatctcaccacggagacccgaactggggcacagtctctttgacttgaagaaaatggaacgtattattgggatttttagaattcttcaatgagttgtcacaggaaaatgcttcgctgtggacttggtgtgagactggatgctgagatgatatccgctgcatcagctgggagggtagtgaagtctgcatgtcccagctgccccagcaaagaggcctcttcctcccacaattcactgcgcgcaacagggctttccgagaaggaaggctcacctgattggcttcactgcatggtgcctcacttccgagtgcgcatgtctacatcctgatgtctcctcaaccctggagattgaagcagcccgggaacagcctgcactgccggctctggaaaacgctggggactgggatctactggctttgttttttatgctgaatcagttttgaaacattctgccttggtttttttcctattactttgataaaaccccacgaccaaaagcaacttgggggaagaaacggtttatttcatttacaactctcaggccacactctaccactaaagaagtcagggctggaactcaaggcagagactgaagcagaggccgtggaggggcactgcttagcggcttgttcacgatagctcgtttgcctgctttattccacaccccggaccccagcccagtggtggtaccctctcacagtgatctgggctttccatatcagtcaccaatcaagacgggtcaatcttgtgggagtaattttctcaattgatgtcccctcttcccaaatgactctagctttatgtcaacttgggggaaaaaagaaaagaaaaggaaggaaaagaaaagaaaagacccccagctcacctctttctctcttcccagtaa

SEQ ID NO: 212 - DNA, 3130 bp, Mus musculus
cgggtttcggcgcggttggcctgcagcgggcgagcctgggctccgagcggcgcggtggtgtggttgccagggtggccgctcgccatgccgtcccgggtggaggactacgaggtgctgcacagcatcggcaccggctcctacggccgctgtcagaagattcggaggaagagcgacggcaagatcctggtgtggaaagagcttgactatggctccatgacggaggtggagaagcagatgcttgtgtctgaagtgaacttgcttcgggagctgaaacatccaaacatcgtccgttactatgatcgcattattgaccgaaccaacacaaccctgtacatcgtaatggaatactgtgagggaggggacctggctagtgtcatttcaaaggggaccaaggatagacagtacttggaagaagagtttgtccttcgagtgatgactcagttgacgctggccctgaaagagtgtcacagaaggagcgatggtggccacactgtgcttcaccgggacctgaagccagccaatgtcttcctggacagcaaacacaatgtcaagctgggggactttggactagctagaatattaaatcacgacacgagttttgcaaaaacgtttgttggcacaccctattacatgtctcctgaacagatgagctgcttatcctacaacgagaagtcggacatctggtccttggcctgcctcctgtatgagctgtgtgcactaatgcctccctttacagctttcaaccaaaaagagctagctgggaaaatcagggaagggaggttcaggcgcatcccctaccgctactctgatggcttgaatgacctcatcactcggatgctgtttctcaaggactaccatcgaccttcagtggaagaaattctggagagccctttgatagcagacatggttgcagaagagcaaaggagaaatctggagaggagaggacggcgctcaggcgagccttcgaagctgccggactccagccctgtgctgagcgagctcaagttgaaggaaagccaactgcaggatcgagagcaagcactcagagctcgggaggacattctggagcagaaggaacgtgaactttgtattcgagagagacttgcagaggacaaactggccagagccgagagcctgatgaagaactacagcctgctgaaggagcacaggctcctatgtctggctggtggcccagaacttgatcttccatcctcagccatgaagaagaaggttcatttccacggggaaagcaaagagaacaccgcaaggagtgagaattctgagagctaccttgccaagtccaagtgcagggacctgaagaagaggcttcatgctgcccagctgcgggctcaagccctggctgatattgaaaaaaactaccagctaaagagcaggcagatcctgggcatgcgctaggccggcaaggcatggagctgggtcagtgttgatactgacaacccactagagattggtattcagctgctgtcgttttgtgtgtctggttctgtgggcaggaacctttgtgtgtggtgagctcgtggcattgcttgtggtctgcaaatggatgtgtgtgtctgcttcctaatgtccctgtgtgaaaagcaagctgtctttgctggttggttgggcttttgatcctgtgtgtgattactacttggaatatgagatggggcactatagatactatagatcttaggagaaaataatgttagggaaagaatatttaacctggagggctcagagaggctcacacgctgagtgataccgccttcactgtggcttccaagtgaggcctcagcgggtccatgacctcactgctaacgggatgcgtatggcagggcccacagggttgcatgtcagaggtgttgtaatgttacagggaggagacccagcctctggcctgacctccctgatgagaaggcactcaccaggattcccattccaggaaggtcctctgtgccagttaacatcagattagaagtggaggggaggggaggccgaggcctgaagcttttaggatttgccttagggaagcgcgtgccatggccctcagcacgctgctgtcctgcatcctaggcaggcactggggacaggaggctctgggagccctgagagccccctcctgctgtgtgcagggcctgtccccgtctgtctgtatctgacctctaggtcagttgatgacattagttaagtgtttctgtacctacaagtataagccaaaaggtcggaaatgcctcagagtcacacatgtggtccccaaacatttaatttctgaagagaactgtcttcagaaagttggtctatttaggtgactggggaaaaggcaggtttcctttgctctctgtccacagtcccttgagatggcttcagaagagaacagtgttcagtgtgcgttattgagggccctgtatgccctccacctgtgtgagggccagattgctgtttgtctacggtttcttgaagacctcagctcagcagaaaggagttcatttgccctaacaagtactgttggctgagaggggaggtcagaagcatgtaatgccattcgtttcatggctaaacacacagactccttgcattttaaaattctgtgcctttacttcctggagctataataacgtgcttgggtgtgtgacttgccgaggttggctttcgcaatgctttatgtaaactctgctgttggcacttgcagctgtagaagctgtcggagggattacttacttacggttatagcatctggggtctcttgcagctgcaatgcctgggatcttttgcaactctgactttttcagtagcagcttggaatgttaaaatatggtgagcctcttctctgtgaaggaagggcctgacaatctgccagcagggaaaagactgggaactcagtgcagtggttttcctgcctttcccttctcctttggtctatagtgatactgacagcaaacccaagtaaaatctgtgtaaaaaaaaatcctaagtatggggtcctaaatgttctgggaatttagaaaaaacttaattggattccattgtttataattaaccaatcatcttatttaaaattttcccaaataaaaaaaatctattttgtgggaaaaaaaaaaaaaaaaaaaaaaaaaaaaaaaaaaaaaaa

SEQ ID NO: 213 - DNA, 1332 bp, Mus musculus
atgccgtcccgggtggaggactacgaggtgctgcacagcatcggcaccggctcctacggccgctgtcagaagattcggaggaagagcgacggcaagatcctggtgtggaaagagcttgactatggctccatgacggaggtggagaagcagatgcttgtgtctgaagtgaacttgcttcgggagctgaaacatccaaacatcgtccgttactatgatcgcattattgaccgaaccaacacaaccctgtacatcgtaatggaatactgtgagggaggggacctggctagtgtcatttcaaaggggaccaaggatagacagtacttggaagaagagtttgtccttcgagtgatgactcagttgacgctggccctgaaagagtgtcacagaaggagcgatggtggccacactgtgcttcaccgggacctgaagccagccaatgtcttcctggacagcaaacacaatgtcaagctgggggactttggactagctagaatattaaatcacgacacgagttttgcaaaaacgtttgttggcacaccctattacatgtctcctgaacagatgagctgcttatcctacaacgagaagtcggacatctggtccttggcctgcctcctgtatgagctgtgtgcactaatgcctccctttacagctttcaaccaaaaagagctagctgggaaaatcagggaagggaggttcaggcgcatcccctaccgctactctgatggcttgaatgacctcatcactcggatgctgtttctcaaggactaccatcgaccttcagtggaagaaattctggagagccctttgatagcagacatggttgcagaagagcaaaggagaaatctggagaggagaggacggcgctcaggcgagccttcgaagctgccggactccagccctgtgctgagcgagctcaagttgaaggaaagccaactgcaggatcgagagcaagcactcagagctcgggaggacattctggagcagaaggaacgtgaactttgtattcgagagagacttgcagaggacaaactggccagagccgagagcctgatgaagaactacagcctgctgaaggagcacaggctcctatgtctggctggtggcccagaacttgatcttccatcctcagccatgaagaagaaggttcatttccacggggaaagcaaagagaacaccgcaaggagtgagaattctgagagctaccttgccaagtccaagtgcagggacctgaagaagaggcttcatgctgcccagctgcgggctcaagccctggctgatattgaaaaaaactaccagctaaagagcaggcagatcctgggcatgcgctag

SEQ ID NO: 214 - DNA, 32835 bp, Homo sapiens
cgccacacagcccttagcgtgttgcactgttgcagtggacaagctctccgggatctggcaaggatggtgaagtctggtcagaggctagatgccaggcctcacagcacagctatcacaacagaacctaaactggaaattgggtttttgctgttgtttttttaaaaatcccctgcatctttgttgttgttgttgttgtttgagacggagtctcgctctgtcgcccaggctggagtgcagtggtgcaatcttggctcactgcaacctctgccctctgggttcaagcgattctcctgcctaagcctcccgagtagctgggactacaggtgcccaccaccacacctggctaatttttgtatttttagtacagacggggtttcaccatattggtcaggctggtcttgaactcctgaccttgtgatctgcccccctcagcctcccaaagtaccaggattacaggtgtgagccactgcgcctggccaacatcttaaactaggtaagccacataagctagctttcaagatcttgaatctcgagtagatcccagctggtcttcagtttttatctgccactcaccaccctgagtcaaatacttaaggtctttgtgcctcaagtttctcattggtaaattcctatgggctgttgtgaaacagaataagatgatgcttacccagtgtctggcctgagagctcagtaaccagctgttctaagaactagaggaacaggctgtagctttaggctttcctttctgccctgggatgttctccctgtcaaaaacaacagcactgagactgctgtcctggtgggttccaccgaaggattaacactgaacagcaacaaaaaagggtgcgggctcttcctcctggaccgaatgcacactcgagtttgttgcaagtacctgagagctcattgcctgccttggctgtggaataggcccatgccggtgcttatgtctttctgttctatcccctgaaagtcaaaacaaaagtttcttgtcttgaggtaggaggtgggactcgactccagaggtggggcttggacaccagactagattgaggactagctaaaacagagccggggtgaaagcagctttgaatcagacatgcccaccactgagacatgtcaatttactgtagccatggcaacacctgggcattaccacccctttccatggtaatgacccaatgacccaaaagtgcctacccctcccctagaaatctctgcataaactgccccttaatctgcatgcagttaaaagtgggcataaatatgactgcaaaactgccctgagccgctactccctgcctaagttagccctcctccgcaggagcagtcatggagttgtaacactgcttcttcaataaagctttcttctacctctggcttgcccttgaattctttcctgggcaaagccaggaacccagcaggctacgctccactttcgaccttgcctgccctgtatcactgacttccttctgaaccctcctcacactaagcagatgctcagccacctgtcgccttttccccactcccttagcccttcccaaggtctgggctgggttgcattcagattggtgtgatcaccactttcatggtggcacagcttgcttggggaactcaccgatggcggataaggggaaggcgtgagttgtgacatgtcctataaggtactatgtcatgagcatggaatatgaaatcagctgcaggctgatgccatgtgggtggtgccctcctatgtcggggtgggaggcctcctgggcaggattctttttctcctggggcacaggaacaaggtgcaaacaggcagaagggcaggtcccacagctgctctggaaggctgaccaggctgtccacacacactctatcaacccccctcactatcttgtcccactgtaacttctgctggctggcttcagccccactcaacttgcaaatgctcttagggaggttgctatactctccaaatgaccaaacgagtgtttacaactctgcccttaccttatttgctctttctgcaacatctggcatcatggaccacttctgcattctggaaaccatttcttctatgggaacctgtgtgacaattttttccatattctctcctactcccctggatgcttcccttggtctccttcactgagttttcttcctctgcttgcacagaataacctccagggttccttcctttctcccttcctgctctgccactcttggggcatattcatcttcaaacgtggcttctgttatcacctcccagctctctgtctctggcctagaccaatctgttgagaccttgtatccaactgcgtgttggccagctagctcctcataggcctttggggctcaacatgaactcagtatcagctttacccaagctgctcctgccccagcatttcctcctgtggtgaactacgctaccatccatctggtcactcaagccaggaatttccctccgtttaccttatgtacagttgatcaccatgtctcatctaacccaccttccaggcatttctggactcccctcttcattcccacagccattgcctcagtttagccagtgtcatttccccagggttgctgcgatagcttcccacgctgtattcctatgccctgcattcactctttaccagagaagtctttctacagcacacatctagtagtgctcgtctgctcaaagcttccactgtgagtccatcaccttcagtagacttcctcaactcttgggtcttcctgctcacctgtccatccacctgtcttacaggtaacgaaccacaggtaccctttggtccaccaacccaacctgcagctcacagcaggcctccatgcttttacccacagtttcccttctcctaattccaactgctcctttagatgggattcaagtgtcacctccccaggaacatttgccctgacccccatgccctgccatctttatcagaatctgggtcctcctctttgcattttaggcaaagctctttcagagcaattatcatactacatagagagagctgatttacacagcagttccagtgaagttttggtgagaggggatggaatcacaacatttagagtaggaagggttcaacaacttcattttacagagcccagagaagggatgttgaaaagctaatgcagacatagctacttaacaaaaattgtcattcggggtcagaccaatgactaaacagcccagtgttccagtgaggtgaaatggattccctcggtcacataactcattaagacagaactaggccagacacggtgactcacgcctgtaatcctagcactttgggaggccaaggcaggaggatcacctgaggtcaggagttcaagatcagtcttgccaacatggtgaaaccccacctctactaaaaatacaaaaattagccgggcatggtggtgggtaactgtaatcccagctactcgggagactgaagcaggaggattgcttgaacccagaagacggaggctgcagtgagccaagatggcacccctgcactccagcctgggtgacagagtgagcaaacaaaccaacaaacacacaaagaagacagaactagaagagcctgggaacctggagctcaagctcactgctcctaccatcactgtgctgcccccgatggaaaaggtaggcgtgtcctctaaaacctcctaagtcccttagaaacacattatggtcctgtgcaaggtggttcaggctgctataataaaatactttagactgggtaatttatgaataacagaaacttatcgcttacagttctggaggctggaaagtccaaggtcaacgtgccagcagattcagtgtctgatgagagcccgtttctcatagatggcatgctctatgtgtcctcacatcatggtagggcaaacacatggcaaacaaactccctggggccttttgtattaatataagggcactaatcactcccccagaggctccacctcttaataccattaccttgggggttaggtttcaacatacgaatttagggaggtcacaagcattcagactctagcaggcctcaccgtccataattagttttaacatttgtcttatcacatttaggtgatgaatattcttagagataacaaatatcctgaatttacaagtaacaggaaaaaacatggaaaattatgaatgtctgtctttgtctgaaagtttatccttatattgaaaagaaatgtttttccctaatttgtacccttgggtataaattcaaaactattgccttttaaaatgtgatggagctcttaactaaacactgtttggtttcaaagataactttcttctcatcatatcctccagctgcctgccatttagctgaagctgtctctcagtctacatcttgtcctgtttatctcacgtggtatgtggctgttaagaacagtctgcctaacacctcattctttgttctagaacgtggttatttgttgagcatatagtatgtcatgcatcttttttttaaaagcatctcttagcttctgattgttataaacaaagaatctctccttttttctttctagaaatcttttttaatcactcgaaagaattgccataatccctgacttcaaattgcttcaagtaattgtggagataagacttatacacaaatgtcttgtctgattttaaatcctacacatgcaaatctggggatttcctgtagggacaggcggagtagtgctgccgcgcaggcgccagctcctcgtttattatgcagtgatgtacagccctctagtgggtctttaatgcaacataaaaaaacgaagctgagggcaatgaagtatggctttgttcattcatccattcatttgatgtacaagtgctgggttcctgctttgttccaggcacattttaggtgctgggaatactgcagtaaatcaaacaaacagcaacaaaatcagatacattagttactggagactaagaagatggagaggagaacaaatttgggatgaagatcaggaacttgatttttggcacattaagtctgggatgctcattaatcttcaagtagcttcttttaaacattaattaggtgccggatgcagtggctcacacctgtaatcccagtactttgggaggccgaggcgggtggttcacttgaggtcaggagtttgagaccagcctggtcaatatggtgaaaccctgtctctactaaaaatacaaaaattagccaggcatggtggcctgcacctatagtgccaactactcgggaggctgaggcaggagaatctgttgaactcgcgaggcggaggttgcagtgagccgagatggcgccactgcactccagcctgggtgacagagtgagactctatcacaaaaaaaaaaaaaaaaaaagaaaaagaaaattaaaattaaaattaatcaggccaggcgtggtggctcacgcctgaaatctcagcattttgggaggctgagaggcttgagcccgggagttcaagataagcctaggcaacttagtgagacctcatccctacaaaaagttaaaacaattggctaggcatggtgatgtgcaccggtgatcccagctaactcaggaggctgaagtgggaggattgctttaagcccaggaggttgagactgcagtgagctgtgatcgtgccactgcactccagcctgggccatagagtgataccctgtctcaaaaaataataataatagcaatcagtgtctctatggacatgtacagagtgcctgtgggagaaaatgcaagtgcaaatactctcttatttgagatttcaccaaatttaaatgaaaactgacaacatgagcacagttagcaagaaaagtgtgaagacagtgaattagaccatgggtgtggggagagtggttatcgagaagttcaagggttggccccactcttatagagttgctcatcttctttctctgtttaaatggaatcatctcagttcttcgtttgttttcttcttaattcttgccacaatttgtcacagtggagtttctctgtgtacttaggttacatccatctcttccacctacaggactatatgtctgtcctattcactgtggtatcctcagcatctggcacctgactcagcctctatttatacttgttggaggatgaattttccatttaataaggcagagaagatacatgcacatgagaagctagtaatatggcctagtataattctaaatgagtaaaaacacagttgattactcttaagagtaattagaagatagatcatagtgggttgaagtcaatcaggaaaaatttcagagaagaaattgggcatgagctgagacttaaagaatggatggaatatgaaggaaaaaggaaagaagttataggggaaaggatgttccctgtaacctgtccctgtttgactcccacatgcttctcatctcccagtgtctctttctattctggtgtctagtggtctctgctgggctgtcctgccctcactcatgatgcgggctaactctggccaacctttagggtttgtcatgtgagtgattcctatgctaccctttttttttttcttttttttgagacggagtcttgctctgtcgcccaggctggagtgcagtggcgcgatctcggctcactgcaagctccgcctcccgggttcacgccattctcctgcctcagcctccccagtaactgggactgcaggcgcctgccaccacacccagctaatttttttgtatttttagtagaggctgggtttcaccatgttagccaggatggtctcgatctcctgacctcatgatccgcccaccttggcctcccaaagtgctgggattacaggcttgagccaccgtgcccggactttttttttttttttttttttttttttgagacagggtctcggtctgttgagcaggctggagtgtggtagtgcaatcttggctcactgcaacctctgcctcccaagttcaagcgattctcctgcctcagccacccaagtagctgggactacagacgtgccaccacacccagctatttttgtatttttagtaaaggcagggtttcaccatactggccacacccagctaatttttgtatttttagtagaggcggggtttcaccttattggccacgctggtcttgaactcctgacctcaggtgatccgcctgcctcggcctcccaaaaggctgggattacaggcatgagacaccacacccagcctcctgtgctactctttattattgtctttggggctccactgtctttttttaaatgaaaagccagcatgtcaatacctatcatacctgggccatagcaagtgctcaataaatacttgttaaatgagcatatgtgcgtaggagccacattccatactcttgggatggctcctttccagatatttcgtctctgcctagagctggggcatttggcaattgagtacttgagggcccactcaaaatccttgcataattattaataaggggctttcgcagatttttatttaacgaagctttattgcatgccttctctattacaggacttatgctggctataagcagttcggagttcagctactgtgagagccatgtaaacaaataatgataagttttgatttatgtataaagtggtctatgaacactgtagatggaggattgactgtccaagtacgccagagaggcttctcagattacaggagaaaaagttggaattgaatcttgaaggacacgttatgtcctctgggcagacatgactggagtggataagggagtgggttggacagtattctggacaaatgcaatcacaggtgcaaagatggtggtggtggtgaggaactgagaaagtgtgcgtttagagcaaaagcagaagtggccagagagaaggtgcaggactggatttggggcaggataaccaaacggctcattttttttttttttttttttcttgagacggagtctcactctgttgcctaggctggagtgcagtggtgtgatctccactcactgcaacctctgccacctgggttcaagcgattcttctgcctcagcctcccgagtagctgggattacaggtgcctgccattgtgtctaatttttgtatttttagtagagacggggttcaccatgttggccgggctgatcttgaactcctgacctcgtaatccacccgccttgacctcccaacgtgctgggattacaggtgtgagccaccgtgcccggccagggctctgtcttatacagtttcatgttgctataataggatgccacagactggacaatttataaacaatagtttatttggctcacggttctggaagctaggaagtccaagatcaaggggtagcatctggcagcagccttttctctgggtcataaaatagcagaaggcatcacatggtaagagaaacagcaagggaaagccaaactcatttttataaccaaccgactctcaagataacccactcctgtgattacgttaatccattcgtgaggggtagccctcataacccaatcaatttaaaggtctcacctcttaacacttttgcattaagaataaagtttccaacacatgaactttgggggatacattcaaaccacagcaagctctatggataccaatctgtaagaggcacaaaaataaaaaaatgatgctaattaacacagccacttgcagtgccttacataacttttgaaacctaaattggtcctattcccctgaggtaagacagtgcccttgaatgttaatttaaaaattctcctggttggcaattccaattatcttatgttatattcagggcatgtaataagtcccttatttttacataaagagcttttaaattcttattaatagaaaatcaggtgtcttttaatcctttgctgaacagatatttaaagaaaactggcctgttcatgcatttccaaattattagctttctggtaatttacatattcctctaacaagccctggatggaggcctctaagtcctccttccctggtaaacatggggctgttcatttggctgggtaagctgagaacgttggtgtgtgggtgcgtaaaagagaatctgtgttcaatgaagtattgtcgatagggttaattgtgtatttggcacacataaacgggacaagacgtgtaaagtacttggtaggagagcgacagtatttctccttttttttttttttttggagactgggtgtcactctgtcgcccaggctggagtgcagtggcgcacggctcactgtaacctctgcctcccaggttcaagcaattcctcatgcctcagcctcccaagaagctgggattacaggcctgcaaccccatgctctgttactttttttttttttttttcatttttagtagagacggggtttcgccatgttggccaggctggtcttgaactcttggcctcgagcaatccgcccgcctcggcctcccaaagtgctaggattataggcgtgagccacagcgcccggcctaattttcgtattttcagtagagacgaggtttgccctgttgcccaggctggtctgaactcctgggctcaagcgacccacccacctcggcttcccaaagtgctagggttacgggcgagcgtgagtcaccgcgcccacccgggagtctgtatttctaatttgtattcagctctcagcatatcctcaacgtgaccccacccaggttcagggtactggaacctgagcgaggaaggcgtgtgccggggagagtaggtagtgtgaggggccagagtgcaaaggtcagaaggcatctggtggaagcggtgtgcaaagaagcctgaggggaggtccttagatctcggttaccttggcgatctctatcagagggttagagttgccgagaggcgccagctgccgcttcctctctcccgccctccgtttggcttagctcgccgggttctcccacaggttaaaagcagacgccgacgcggttgcctagtgacacttttcccaaaatgcctagggtattgttgtgttcttcttagccaatgagagaggcgaagcggcccaccgcctgccaatagactgcgagatcagggcccgcgacggttaaacggggcccaaggcaggggtggcgggtcagtgctgctcgggggcttctccatccaggtccctggagttcctggtccctggagctccgcacttggcggcgcaacctgcgtgaggcagcgcgactctggcgactggccggccatgccttcccgggctgaggactatgaagtgttgtacaccattggcacaggctcctacggccgctgccagaagatccggaggaagagtgatggcaaggtgagcgtgggacctaccctgcgcctgcccctgcttaggtttcgtcgcctcggggcgagcgccctgcgccaccgaagggaaccgacagggctgaggaaatgggtgcccggaagactaaaccgtctttcctgggtctgcatctgacagcctgtcctgggtggcttaaaggatgggagaccgcttcttttgatatatgtatttccatcttttcccgtttctctccccatttctctctttctcctgctttggcttgctaaggaccttccattggtgacaggtaactaattcctgagctgtttttagagctctaagagtggccctctcaggcacaagaaaggggcaggactaccagaacccgaagctttgtatctgcagtcagactccctcaaaatatccattattaggattattggattcatatttcccaatgtatataggtagaacttttacagaaagtaacattggacaggaaactgcctggctgctgatggagggatctttaccaaggtgtctcatcctgggaaaacacgactggggtggaatggggcagggactttgaccaccttcaccccaattttgactatagtaccttttagccaacttcccactaaccaactgagggtaggggttgggggagtcctcatgtgcctcattcccgtttgtctccccacaacatacatttactgcttagaactggaggaagattatggaagtaaactcacagctccttaagttcattgaactaaattagataatgaccttgattgtaggatataattaaaagggaggtaatttgttaaatcttggaactttcattctttgtttttgagcataatgagttcattcataccttggaaattcttatttcagatattagtttggaaagaacttgactatggctccatgacagaagctgagaaacagatgcttgtttctgaagtgaatttgcttcgtgaactgaaacatccaaacatcgttcgttactatgatcggattattgaccggaccaatacaacactgtacattgtaatggaatattgtgaaggaggggatctggctagtgtaattacaaagggaaccaaggaaaggtaagcataatcttttaaaaatgtaagctgaaattggtctagtttcatttattttaagcatcttgttttaggatcagtaatatggaagagtgtatttgtatttgtttggtaggtccacagtactttagaaaattcctggtgaatcaacacccatattttatatcaaaataacaatttataggctgagtgtggtggctcacacctgtaatcccaacactttgggaggccgatgcgggaggatcacttgagcccaggatttcaagaccagcctgggcaacatagtgggaccctgtttctacaaaaattagccaggtatagtgacatgtgcctgtagtccaagctacttgggaggctaaggcaagaggattgcttgagcctgggaggtcgaggctgcagtgagccatgatcgtgccactgcattccagcctgggtgacagagtaagaccctgtctcaaaaaatataaataaataaataaataaattccctatttgtacactggataatttatatcatcccatcttggcaatgatttttttagaagttatatgctgtataactgctttggttttaggcaatacttagatgaagagtttgttcttcgagtgatgactcagttgactctggccctgaaggaatgccacagacgaagtgatggtggtcataccgtattgcatcgggatctgaaaccagccaatgttttcctggatggcaagcaaaacgtcaagcttggagactttgggctagctagaatattaaaccatgacacgagttttgcaaaaacatttgttggcacaccttattacatgtctcctgtaagtatttcagaatttagctactttttaaaacatcttttatttttgttttcttgtttgtttgtttttgagacagagtctcgctctgttgcccaggctggagtgcagtggtgcgatctgggctcactgcaatctctgcctcccaggttcaaaggattctcctgcatcagcctcctaagtagagtagctgggactacaggtgcatgtcactatgcctggctaatttttgtatgtttagtagagacagggtttcatcatgttgaccaggctggtctcgaactcctgacctcaagcgatctgctcacctcagtctcccaaagtgttgggattacaggcgtgagccaccatgcccagccaaaacatcttttaatgttaagcattctgaagcagggaaattgagttttctgttcgtttagtaatatctagtagccaagaattgaaaatactgttatatttttccacatggaccaccagaccaataaagtctatatcagtttttgtttgctgcatgagttatgtgcattaatgtaagtatgatgaagacagattcctagtctaaggtttgcgccgtttgtcatctctcactgggttcaattttttgagcattcatgcaaattaaagcatattcagttcaagcttttatggaatgactatgatgcattaaactcaaggattacaaaaatgaaatggattttgtccttgccctcaagagttgtttcccaatgtgtaggtcctagttatctgcatcagactcacttggagtgtttgtttaaaatgcagagttctgggtcccaaacccaaacccaaatccatcgagtgaatttcgatctctgggtgggttcttgaactctgtttttttttttttttaatattttactttttattttagactttgcatttaagaggctctgtaaatgattcttgtgtatgcagaatcagagctcaggaagtttgctcacttcagatagcatgtttttacaatgttaactttttgtacattttatttttttgttgcctatccctgaaatatcttgctgagtccactcaccaattacctctattgctggatattttgtttccaacatgtttcaccattcttagaagtactgctctgcatatctttgtatgaattattctttcttcctttttggttatttccttggagtgtagctcataaaatgaaattgctggggtaaatgtttatggctgttattagatattgtctgatggcttttaaaaagtttaagtcaattgtgatagcactaatgtgttagtatataacatctgaacagataaagatgaagaaatatttgttagtattttagtagttcacctttctaggattttccaaatatttataaattatgttaacagatcttactatagtataaaactttgtaaattaatgattttggttttgactaaaaatagccagaacagtaccattttctcactgtatcaaattccaaatagaatgtttttaacataaaggacaattatccagaagtggttcttgggaaatttgaaacctattcttttgttccttttccctcctgcccttgtaattagagtggttcagctttcctaaggcactgattgtcaaaaagtggcatcagactcaccagttggactttaaaacactaaccagccactagagattgcttctattccctctgttgagaataggagctctggtaggctgttgttactgtagatgtggaagaaaggcaaacaataaaataggtaaggataatattagttactactgtgatttatggagtggactaagacaaaatataaatggataattcaattagctatttatgtctatatccatttaaatgtggactagatacatattttgactattcttaaatttcctctagttcttttaaaatggtgtttcttaatttgccttgagagtagaagtctctcatattcacctctgtattgtcagtgcctagtctatactaagcactttcatttgtgaatggaaaatgagtgaatgaattatgtatgatggagtgtattggaacaagatcattgccttttttccattataaatttcaagataaagtataagctaaaaactttgaggttctgtttttatctcaggagtaatttaatgtgttttttaagtttcaaaacaaaataaactcttaacaccttccactttcttaccctttttccctgtataggaacaaatgaatcgcatgtcctacaatgagaaatcagatatctggtcattgggctgcttgctgtatgagttatgtgcattaatgtaagtatgatgaagacagattcctagtctaaggtttgtactgtttgtcacatttcactgggttcagttttttgagcctctgtgctaacgaaagtatattcaagtctgaaagaattgtaccctgggtaaaattaaggtagatagatgaacaggctaaaagaaactattcacaaattaaaactataagccatgaggctgggtcttgactgttcaagggtcttggctggttaggtgctttcttattagattgacacttagctcaagggagagcacataggtcaggcaggtaaggtaaagctactgtaaggatgtggaagaaatgaaacaagactcgggtagaggtctggggatctgtagagcagggaagagctccaattcttttcctttgttcttcttttcattttctttccctttgaaactattctgtagagcagtgattctcaactagggataagggaagcaaatttgcctcttatggggcatttgatgatgtttggataaatttttagttatcacagctggggagtgcttctggcatctagagggtagagggcagggaggctacaaaatacctataatgcacaggacagccccccacaacaaagaattatatgacctcaaatgtcaatagtgccaaggttgggaaacttacttataagaagaaaatcccagaagtagaaacttaaatacaaactggagcttaagctgtgcttttgatttagttcctattgtatattttcatttttacaatttgaaaatgtcttcgtcgtcttcttcttcttttttaaccctaggcctccatttacagcttttagccagaaagaactcgctgggaaaatcagagaaggcaaattcaggcgaattccataccgttactctgatgaattgaatgaaattattacgaggatgttaaacttaaaggtaaagatgataagatgatatattgtctgtttctagctgtcagttaagtgtcagagcatacattctctcttgtagatcaatggagactgaagaaacgttaaatatactttcttagctaaatttactgtgttaacacaagtgaaaacatatgtaaatttggcaaattgcacatccttgctggcccaccttctgcgctttctttatttctcctcccactctgtcatgctaacagatggtcggtagcaaggaaagattgcaaaaagaattcaaattctcgttccccttgtccttgcctacctcacagtggcaggtagtgagggaaggggccagaaataagagtttattactctgcctctagctctaattgagagattaaagaccagaagaaggggaggggtgatggagggcggacggaggacagctaaaaacagagggaaaatcaataaagagattatgtggaaaaactctggctatagaatggggaaggagatgttctggggaccaggctgacataagagaagaaggaaaatgccgtaggatcacagagaaggatacagatgaagtgacaggattgagagtcagtgagagagtatcttgctaaatgtagtttagaaatgcaagggcagtacttcccctaaaacagaccctagcaatgctaccaagccccagcacaagatgtgccaatcttcagggattgaaccttcttagaaaggtgaaaaggggaaaagggaaaaaaggtaagttaacatctgcattaccttgtggacccagaacctcatgagttaaaaccaccagtgaacttatttttccaagtgtttaagacctagccataaaggagtcctttcttttgtcttggaaacacatttttgtccttttattttaactgctgtcttaggaggactattctgttatgcaatctgactataatactgagtattttttccccaggattaccatcgaccttctgttgaagaaattcttgagaaccctttaatagcagatttggttgcagacgagcaaagaagaaatcttgagagaagagggcgacaattaggagagccagaaaaatcgcaggattccagccctgtattgagtgagctgaaactgaaggaaattcagttacaggagcgagagcgagctctcaaagcaagagaagaaagattggagcgtaagtctgaatgggggtcaaagcaaaggagaactaccaagtgggttattttgatgtgtctgaatatctctttgagcagaatattttatacatacagatcttattagaagcttttgaaaaatacttgagaaaccaaaatatgtattttagactttttaataatcaggcttgctggcaccttcatgttggacatctttctctgagatcagttgctagttatatattattgggccttaactgtgatggccctaatacgatagccttgtattttactctagagttacttttttctttttcgtctctactgtgaataccctaatgttttcccactgtaaaggaaggtcttaaaattgctgctttccataataaaaaaccatgacttttgtcttttgaaatggccactccaacagaattccaggtctaaaaccctacagtatgtagatgagatatgttcaggcaattcttttctttttttttaactttttatttttgaaaatgagatggggtctcactatattacccaggctggtcttgaactcctgagctcaagtgatcctcccatcttacctcccaaagtgctgggattataggtgtgacctaccacacctggtctgttcaggcagttcaatagagaatctagatacaagatattttaagtctataaataatactctggtgggtattaacattgacttatgagtattaactgattagatgctaatttagttttgatattgaaagtgtgtctactccaccaagatgagagctactcgcaagcatttagggttatgcaaggtagctacagagtgaggttcttcattttaacatcaggagacgagagatggggtcgtatttgtgacctgtcaccctcatgactcacctgattttacttctgcagctttatgcccaatccaggctttaaataatgaaatattgtatagtcctgtgagatatgcttactgtataggtacaacctatacttacttggaaacctctgtaaaaaataagaaagctttttcttataactttccccagtgtttcataatttcttttcttttttttttttgagatggaatttcactcttgttgcccaggctgaagtgcagtggcaccatcttggttcattgcaacctctacctcccgggttcaagcaattctcctgcctcagcctcctgagtagctgggattacaggcgcctgccaccatgcctggctaatttttgattttttagtagagatggggttttgccatgttgacctggctggtcttgaactcctgacatcaggtgatccacctgcctcggcctcccaaagtgttgggattacaggcgtgagccactgtgaccagccataatttcatatagcaactgaaatctgaatactttctgaatttggggccatgaataaatagtaacatttgttattaatactaatcctatgaactaccacctaactgaattgtgttttttttcttttgtttgggtgtggtcattcaaccagaagaaggagatttttgtactgtgaggccagatcatgccctgaaaattagctgttgcttatcttcagtgaagagcagagatagctttagttttttgttttcccaaatgagttactcccacaaaagatgaccaaaggttgaagctaactttgtatttgtttaaacaagtcctttcaagaaaatctaagataacatacagcctactaaaacactcaattaaaaactaacataatcaggttgactgaggcatagtgagaatcctttccccaaacattgcttatcagtatcaggcatgctagtagtgataagattgccaaatgtaaattgttttttagtcaaggtcagttgttaatttttttttctttgtccattctctttttaaagagaaagaacaggagctttgtgttcgtgagagactagcagaggacaaactggctagagcagaaaatctgttgaagaactacagcttgctaaaggaacggaagttcctgtctctggcaagtaatccaggtatgagaatcaacttggtcaacagaagctggtgctacaaatgaagaaatgtgcaccagtgttgctcccaaagtggcttaggtagcccttttcatttacaaatctcaaattttaagatggatttcattgaatatatgcatttcaatggaaacaaaattctgttatagcagtgatttatttcctgggttcatagacctgaggcaatgagtcatagaatttcatgtttgattttctttaccttatcaaactacatgtttagtaattgatacttatttttattatcattatttatttttttattttttttgagatggagtctcactctgtagcccaggctggagtgcagtggcacaatctcggctcactgcaagctctgcctcccgggttcacgccattcttctgcctcagcctcccaagtagctgggactacagacacccgccaccaagcccggctaatttttgtatttttagtagagacggggtttcaccgtgttagccaggatggtctcgatttcctgacctcgtgatccgcctgcctcggcctcccaatgtgctgggattacaggcatgagacaccgtgcccagccgatacttatttttaaaaattagggcatttacaaaactattgtatgtttcagatttcagagagataaactgcatttcaagtaaaaataaacattttaatattgccatgcctcatttttcatagaaagcatggcttaaaaggcatgataagccacctgcagaataggctgtcacgtttggatctttgctaacaccctttcaagttgaaagacatatttgttgaaatttgattgtttaatatctacatatgttctctgcatttccttctttatttaaagtctggtatatagatattcagctttctcagggccctgcctttgtgtggcattgtcccttcactctgccgcactgagatgtggttatcgtatataccagtgaaccattgtctaacattctccattttatagaaaccctcaatctaatttaatcgactctttaagattatgtaaaatgcaaactgtgaaacatctttttgcttgatttatgacacaaactaactgttaaaagttgttggtttcaaaaatcgagcatctgaattttcaataaaattcagagtttttataactcccttattccatgtaggacagcatatatgaaagctattattcccatctttaataaattgagatgtagtgtgatcaatttagtgagcattggcagcattttgtaaatggaacagacaaaaaaccctacttaagttagattgatgatcacaataactttgtagtgaataagtgatggaaagaaatgaaactactgatagaagtaaatgaaacaaggattatatgaaactttggcttcatctctgttaaaataccttcttttttcccaatattgcagtctaccatttcaatattataaaaatatttattctggcttttcatagattccacactgtcatccataaagacaaaatagacttaaatcatgattagggtgataaaatgaggagaaaattttacctggatgaatttcatgcatcaaacccattgcagagaattacttaagaccctgttggggatggctgttcggttaaagagtttatttacatttgccctgatagtctttgagcaaaagatgaaaatagctaagtaaggatgatgtgttttactttataggatacacagataagtatgggaatctacttatatgtgaatcatggcaaatatttaaaatgagccataggaatcaagtatccactggggcaagcagacattttagggtattgagtgctgaaagtagtgaacacatcagagctataagataagcatcatagcagtggggagcgggtaccattctgaactcaggacagttggaaatattctctccccatccttgggctataaaatccacacgtgaggaagccatcacaagtatattgaaatcatcacagcaagcagcagtgtcttttttaaaagctgttcttttcgtatttgatgaaatattcattcttctatttaatggaagaattttaaaaatgtttttaaaacactttctttcttataaaactgtcccattaagagccaagtgtggtgacgcacctatagtcccagctactctggggctcaggcaggaagatcacttaagccgaggcgtccaaggctgtagtgcactacagctgcacctgtgactagccactgcactccagcctggaaaacatggcaagaccccatctcagacaaaaacaaaaacaaaataaaactatcccattagtaagacaatgttgacttacaaatgtaaaggtatttgtggtaataagaaggtggatagagttgaaacagtggagataaggtctaaaagcaatccagtttgctttgaagcagaagcgacgtatgaagcgggaagtcacaggacccttggaaggcagtgcatctgtgtgccagcctttcctatttcttctgcctggagcactcttcatccagacagccctgtggcttcttacttcagaaatgctgtatgaggctttgtatcattacacccagcacccagcacccagcatgtccctgtttccagagctatttttcctaatagcacgtattaccatcaaatattccccaccagtacttgtttgtttgtgtttggtttatctcctcctactagaatagggcctttgtttggttcacagtggcccatcctatgagctcagtaaatattcgaacatatttcctttaacacaaaaaataaaaggattctagaatctgtaagcctccagcccccagtaattctgtcagcagttaatagtgttgccactttaagtaaatatgattattatttattttttccatgtaaagaatagtttacagtttttactactcttacttgatttaccttttccacactgaatttgtttagattttttggaaacagatttctcgtccattaagatgctttgaactaagtgttcttgaacatttaaccaaaactgtaggtgttctctatttaaaaaaaaaaaaaaaacaaagacagaaaaaaacctctgcttctacacttttctgtaggtaaggtgttctgcatagaatggcacttattttcaaggacagagataaataacattgatttccaaaagttttatgttgtccataatactcagtgtgtttaagagtaaaattgattgttggttgttaagagaataaaacttatgttccttgaattttggcacattccaatattattttttcaatgctgtggattaaaaggctgatttctgcaagtcctacacccctaacctcctatcccagagaaaataaaacaggcacctagatttcaaatgtgagccataagagcaaatactttttgataagtataagtatgaaggagttgaactctgttcaagtaactcagagccctttttctttttccttctaaagaacttcttaatcttccatcctcagtaattaagaagaaagttcatttcagtggggaaagtaaagagaacatcatgaggagtgagaattctgagagtcagctcacatctaagtccaagtgcaaggacctgaagaaaaggcttcacgctgcccagctgcgggctcaagccctgtcagatattgagaaaaattaccaactgaaaagcagacagatcctgggcatgcgctagccaggtagagagacacagagctgtgtacaggatgtaatattaccaacctttaaagactgatattcaaatgctgtagtgttgaatacttggttccatgagccatgcctttctgtatagtacacatgatatttcggaattggttttactgttcttcagcaactattgtacaaaatgttcacatttaatttttctttcttcttttaagaacatattataaaaagaatactttcttggttgggcttttaatcctgtgtgtgattactagtaggaacatgagatgtgacattctaaatcttgggagaaaaaataatgttaggaaaaaaatatttatgcaggaagagtagcactcactgaatagttttaaatgactgagtggtatgcttacaattgtcatgtctagatttaaattttaagtctgagattttaaatgtttttgagcttagaaaacccagttagatgcaatttggtcattaataccatgacatcttgcttataaatattccattgctctgtagttcaaatctgttagctttgtgaaaattcatcactgtgatgtttgtattctttttttttttctgtttaacagaatatgagctgtctgtcatttacctacttctttcccactaaataaaagaattcttcagtttccctgtagttatgtgtcttgcatttgttggtctcttagttgatgggagttgtgtttatgatttgtaggtcttcattgtagggtacagaaggaaacatggatctgatgctcaagggagtggcattccagtcctaaactgtatggcgctttacctcccatctcattaatccatgtatgtaagccagtggtccttaacagggtgattttgctcctcaagagacgtttggcaatgtctgggggcatttttgattgtcatgatttggggtagggtgctactggctgctagtgggtacaggccagggacactgtaaacattttacaatgcacaggacagctgctgacaacaaaatgtccatgggtttggatcataatcctgaatgatacaatctcaaatgcgaaaatcctgaaagaccaaaatccctaatgtcttaaatcccaaaagatcagaatccctaatgtgtgaacttccaaaatcacaatcctgaaagattaaaatcccagatgttaaaatcctgaaagccgaatttgaggttagggattagtgccgtttcagctgtatacaggataattgcatcatgttaggcagaactattaccttgttattgtcttcatttggaaattaagtatggtttaagagatgtggatggatatcgagttgataaggggtgaacttgttgatttatgtgtcaacttgactggattaaggaatccctagaaatctggtaaagcattattttagatgtgtctgtgagggtgtttccagaggaggttaatatgtgagtctcagtagactaggtggggaatatctttcctcaatgtttagtgttttgaagatcataaaagcgacttttcaggtgaaaagtacaagaaatctctcctgccaaattattcagttatgtacaaattctgctccttcatgaatagtgccacgcttgccttaaaaaaatgccctttgtcagagaataaaattcgacaagctgaacgaccttgtgaaccaaagacacttgctgatactgaggttcctccagtgttacaaaactcattaaccaaactgttcttggttagggatttgactgtcgaagaagatagactgcttatatttaccactaaatctaacagaaaaactatcgcatgttttcattttggctagtggacggcactttcaaaactatccctactggtttttatcaactatacatgattcatgcccctgttggttctgaagattctagaacttatctagtcatttaaacaattatttgaagatttgctgcactttgcagaagaaaatagctttcgattgaatccccaaaccataacaacagatttggaattaggtgtgatcaaagcttctaaaagtgaatttcaaagtgttaccaataaagtttgttttttttccattcagcccaatgcatttgatagaaaattagatgagtagataggccaggagatacagcaatgacaaaaacttcagtttagaagcaggaacccgcatccaggaatagagccctttgctcctccctcagaatgaatggagatcaaaaatcagatgcttatgcccaagaaaaacaggatttcattcagcacttctcccggattgttagggtgctgactgaggatgagatggggcacccagagacaggagatgctatcgcccagctcaaggaggtcctggagtacaatgccatcggaggcaagttatcaccggggtttgacggtgcttagcattccgggagctggtggagccaaggaaacaggatgctgatagtttccagcgggccctgatggtgggttggtgtgtggaactgctgcaagctttcttcctcgtggtagatgacatcacggattcatccctcacccactggggacagatctgctggtatcagaagctgggcgtgggtttggatgctgtcaatgatgctatgcttctggaagcatgtatctactgcctgctgaagctctgttgttgggagcagccctattacctgaacctgattgagctcttcctgcagagttcctatcagactgagattgggcagaccctggaccccatcacagcacccccagggcaatgtggatcttcgcagattcaaggaaaagaattacaaattgtcaagtacaagacagttttctactctttctaccttcctatagctgcagccatgcatatggcaggcattgatggtgagaaggcacacaccaatgccaagaagatcctgctggagatgggagagttctttaagattcaggatgatcactttgacctctttggggactccactgtgactgacaaagttggcactgccatctaggacaacaaatgcagctggctggtggttcagtgtctgcaatgggccactccaaaacagtaccagatcctgaaggagaattaggggcagaaggaggccaagaaggtggtccaggagaaggcactatatgaggagctagatctgctggccgtgttcttgcagtatgaggatgacagttacagccacagccacattatgggtctcattgaacagtatgcaatgcccctgctcccagccatctttctggggctggcgtgcaaaatctacaagcggaaaaagtgacctagagactgcaagggcagggagaggaggctctcaataaattactgtgtaaccttgaaaacaaaacaaaaaacttcagtttaaaaatgcactttccagctgggcgtggtggccaaggagggaggatctcttgaacttagaaatttcataacagcctgggcaatgtagtgagacactgtctctagaaataatttttttaaaagttagccaggtgtggcgtgtgcctgtggtcccagctacttgggaggctgaggcaggaggattgtctgagcccgggaggtggaggctgcagtgagctgtgatgaagccactgtactccagcctgggagacagagagagaccctgtctcttaaagggcaggtgggtggggggtgggggaagagtgtttccttgtgtacagtatgtattaagagatggggaaaaaatgtatcattcgcctgccttggaattccttccagctgatgacattctagaaacttttaatgaattaaagccacatttgcctgaagacgtcagcaaagttactgactgttttgaaaataaatatgtacatggtaggataagaaaatacacaatggtgttgctgtttgatcaccagtactgtttctgtcaaatctgtggcctaatgagtgcatgcagaacagatttctgagtacccaaaacaacacagaagcatgacacagaaaatagggaaatttagtagggaatgctcctgtcagtgtatatggaatcatagaagaatgccaggaagaacagcaccatgtagaaaatgaatgtgaacatattctccaagtagagccatgccctaaaagagaaaaagcagctattcctcatgatgcaagactttaaaatatagttaatgattgtggaggttggccagctcttatggactatctccatgcaattgcccataatccagtcctgtaatacacttttttgtatgtcaaattatcttttttttttctgttttatgtttttttttcactatttaaaattgttggcattcttttttacaatttgctatgctatataattcatcttcaaatcatttctgatactggaggcataatttgtgtagagacttagaaagttctgtttttttgcaaatttgactccatgaaagtacattgtcacagcattgactgtgtgtaagcattgttcctgtacataaaaacattgaagcatcctcagtaagtgaagaggtgtcctttttgtacatctgcatttgtgaaaggtaaaatgtttgaacatcttggctctttaggtggctgcatatgcagtagtgacccatcctgtttttgatagatctcatcaaaagaatcttaggttgttatggtatttcagatgaccaaaggcataaaactgggtgcacacatttaccaaccatggggatatgcatttacatttcccttcttgacctatttctttttttttctttcctttttttttttttttttttttttttttttgagatagagtctcactttgttgcccaggctggaatgcagtggtgtgatcacagctcaatgtagccttggcctcgtaggctcaagtaatcctcccacttcagcctcctgtgatggagtctcactgttttgcccaggatggtcttgaactcatgggctcaagcaatcctcccaccttggctgggattacaggtatgagccattgcgcccagcccctttatgacctatttctttatgaatatggcttgtctgttcattactgatataattatgcaactttcattagtatatatgaatgtttatgcttgcacaaaaatgtatgttattattgcctattttattgcataaagtgacctatgaagtgttctgtgttttcatatgtttctcaaataaattccctttaaaaatgtaaatacatgtaaatgtaaaaaaaaaagtaaataaatatcttttaaagaatttttaaattatattttccggaattacatttttggaattctgctctttcaggattatgattttcaggttttagactttatggattttgaccttttgggacttcagcattatgacattcgggattatggcattaaaaattgtatctcctgggactatgatcggctcccaatgtcaatagtgccacttttgagaaacctgatctaagctcaaacttgttgggacatatctcagccttgaaggaaagttattttggattttgatggatatttaaatatgtatatatctgacttttagtataaattagcagtctatgctgtgccttttcctttgtgagattttcctggcaatgctagtccttttagcttaatgaaataagaccaagttttaaagggttaataataaatgagaggaaatagctcctttatatatgtaggattattacacagctggcagcatagttccatcaagtacaaatgatactatccaaacacaatcagaaactgattaccagatctttaatcctaacagaatcaccttgacatgaatgttgagtataactcctggccagctataaaatttgcaagacctagtgcaaaatggtaatgcgggactcttgttcgaaaagcaggaaacaagtaccctgaaaggtacctacaatgcttttccctttcttccaaggtttctctctctctctttctctgcttattgtgatgttatttgctatttaatattctaagtaaagaaaaattaaaaatttaaatgattagcatgaattttaccatttatgtcgtgcaatgcagattttaaatgcaaatagcagagcattcagctgagatagggaatgaatttcacaattcatattttgtgactcttctctgagggtgcctcaagttgaccagaggagacagacacaccagaccctcaggcatctgggaacccctgactctgacacctgctcagttcccctttcctccagtcaccagacctatgcaatgccaggccaggaggagcagagcctggcatcttccttttgcacaggccaacggccccagcccatggcagtttggccacctccaaggatctttaaacctccaagctgggactttatacttggaccagggtacctcgatggcccttgtcaagacatggccaccagacatgccatggggctgccatgggggagaggggaaatggcttcagaacagctgctgccatgacctgcctggggatgcattggagcctagatactcaatgctgacccttcccttgcctgtgcccaggccccttctggtcatgggaaggggaggttgggtggggcccagtgcactagagggtagggaggggtctgagaatcatcctgggagtctatggggctgatgggaggtgggatcatgcatgaggggaggccctgagccaccacgcaggctcccattgtcccactggactccacttacaaaaggcaaattcaaagacacaagtagtagccaggcgtggtggctcgtgcttgtaatcccagcattttgggaggccgaggtggggtggatcacctgaggtcaggagtttgagaccagcctggccaacatggtgaaaccctgtctctactaaaaatataaaacaaattagctgggcttggtggtggacgcctgtaatctcagctactcaggaggctgaggaaggagaatctcttgaacctggaaggtggaggttgcagtgagccaagatcacaccactgcaccccagcctggttgacagagtgagactccgtctcaaaaataaataaataaataaataaatataaagatacaagtattaagaatttcaagacttcagcctcagagcactagactccaggtgccaggcccttcctaataccaggtttttctacatgtggggtcctgtatggctgtgcaggttactcggctgtgaaaccaccactttctctaggaaactcctttctaccttagaaaataatacgttttcttctcactttgaaacctgaggcatgctggacaacttctctaattttccccatcccagatttcacctttattttcattcatggcttaattcaaccaacaagcagttattgagcacccactatgagccaggcactgtttaaggtgctgaagatacagccatgaagaaacattgaaatccctgccctcactgcccccttcaaatggggcgtgacagtcagcaactaatcagccacagggcatgtcagcaataagcgttaaggagcagagcaaagtgggaaagaggagcaggagtgggggcttgcaatttcagaagaggtggtgatgaggggtgcagcaggaagaggaggagactaaccatagcaggttacagtggaggtgggggtggaggggaaaagcaaagggaatgggagacctgagcgggtccggagagaggaaagacagcagaccagtggtgggctagggggctggggaggggagcgggggtttgagtgaaactgggagaagcaatatggcaggacttggaaactgaggagacattttaaatctgatcatgaatcccctctccttgctcttaagctaacaaaaccttgtttccagttagtcgctgaagctgggaacgtctggggtatttgagcagtcatggtagcttagaagggggtccctttgatgggggcgtggagagcgggttccttccaaacgatgtttctccagcatcgcactgtaagatctttccaagatgttctgttagacactagcactgtacttaccattacacagtttacatgtttaaataataatgagttcaacccagcacaggcctactcacaggcgcttgaaaaagggtcactggatttgaatctgattaaccgactgtcctggccgacagaaccgcaaggtggcgccatggctctgctagagccgcagtcccaccctccccgactagcctgagcaactgggagttactgcgagagtctatgccgggcattggataaatgccttctccccattatttccttcaatccctacaatacccctgtgaagtaggtatcattcgaatcacattttacacggggaaactgagactcagagatcacagctccggagctcaggcttttggcaataaccctccactgcctgcctccgcaagacagcaaaaggttggctttgttccccaagtcatccagtttcccacagtgatgggttaagcgtcataacccatggctttatccaagccatttgaattgaagaggaaggtggacgcagagccagcatggttagggccagtggcctttccagacttgcgtgccaggagagatgggttagcgtgggggaggccggagaaggggttttcaagtgaccccggtaggacccccacgtctctctcccgcctttgctcagcatcatctatagcatggctttgcatttcctcaaaagcccaggccagatgcccagtaccttcaggcggtccagtgtcccccaccccctagagccatctcattcaggactgccctcccctgaaacgttttatgtttccagaagacccttctccttccagggcaaagccctttcagttaggcaagctagttccctcagtgacttaagataaggctgtcctcctaggctggacttgggctgaatgcaaaaggcgacacaaggcagctgtttaaaaaagaatgaagcaaatttatatgcaccaacaagaagagattattgctcattgtgacttggtggctgggaaaataaggatccctattagattgatggatttcacaccaaggaggaggatagaaccagccctcccagagggctgtgcttgctgcaggctagctgatgagacacgtggcttactttacccctcgctcagccccagcctcagcctccctccctctacacagggaagacagaggtcagctgctgagggcctcctcccatgcgaaaggttgcattccacccggcattcagaggggcaccctcgctaacctccatggaggcaccttgcttacatttctgacaccacagccacagcgacagctctggggccctacagctcccctcaagctgctgaaatcccagacaaccaaagctgctcatcccttgatgccctacgaccacccagccaggaaacaaatcccccctcctcccactgcctggactctgagacaatctctggccatcttgatgcaacagagtgttccataatcatagtcacacgttcacaggaagtgttcacagatgattcactctattaaaaaacaaaacaaaacaaaacagttaaatcatgaagtgacaacatcgttgtaaaaagttctaacaatatggaaagtatatatagtgaaaattaaaaggtaaacattcctcacccattagcctagtttctatctctgctttcggaagtagctattaacactttggtgtttggtggtcctttctagactctgtgtgtgtgtgtgtgtgtgtgtgtgtgtgtgttgcgggatggggatagagtgtctctgtgtatgggggtctgtgtgtgtgtctgagtggatccatctgagtatgtgtatttaaaacacacgtaggctgggtgtaatggctcacacctgtaatcccagcactatgggaggctgaggtgggcagatcacttgagctcagaagttcgagaccagcttaggcaactggtgaaacccaaaaatgcaaaaaattagctgggcgtggtggtgtgtgcctgtggtgccagctactcaggaggctgaagtggaaggattgcctgagcctgggaggtggagcctgcagtgagctatgattgcgccactgcattccagcctggcgacagagtgagacctcatctcaaaaacaacaacaacaacaacaaaaacacactgggaaaaataggatctgaatacatgcactattctttaattgtttttccaattaaaaagaatcctttcttgttggtttagataaataaacctttctttttcagacagctgccctgtgtcatcatttaccttcatcccaagttcattctagaaggcagcttaccttgagtcttcagggaactagcctgcctagatcagccagaaaggtggagagtcagcttccacctcaagaactcagggcctggcagccgagatgggcacacatctttgaagcccttacttattcccacaaagcagttaatcagctccagtcacagaatcaccggtcccagtgctatccttaagaatctcgtgcttaaggccaggctcggtggctcatgcctgtaatcccagcactttgggaggccgaggcgggtggatcacttgaggccaggagttcaagaccagcctggccaacatggtgaaatgccgtgtctactaaaaatacataaattagccaggcgtggtggtgcatgcctgtaatcccagctactcgggaggctgaggcaggagagtcacttgaacctgggagatggaggttgcagtgagccaagattgtgccactgcactccagcttgaccaacagactgaaactctgtctcaaa

SEQ ID NO: 215 - DNA, 2119 bp, Homo sapiens
ggcacgagtaggggtggcgggtcagtgctgctcgggggcttctccatccaggtccctggagttcctggtccctggagctccgcacttggcgcgcaacctgcgtgaggcagcgcgactctggcgactggccggccatgccttcccgggctgaggactatgaagtgttgtacaccattggcacaggctcctacggccgctgccagaagatccggaggaagagtgatggcaagatattagtttggaaagaacttgactatggctccatgacagaagctgagaaacagatgcttgtttctgaagtgaatttgcttcgtgaactgaaacatccaaacatcgttcgttactatgatcggattattgaccggaccaatacaacactgtacattgtaatggaatattgtgaaggaggggatctggctagtgtaattacaaagggaaccaaggaaaggcaatacttagatgaagagtttgttcttcgagtgatgactcagttgactctggccctgaaggaatgccacagacgaagtgatggtggtcataccgtattgcatcgggatcttaaaccagccaatgttttcctggatggcaagcaaaacgtcaagcttggagactttgggctagctagaatattaaaccatgacacgagttttgcaaaaacatttgttggcacaccttattacatgtctcctgaacaaatgaatcgcatgtcctacaatgagaaatcagatatctggtcattgggctgcttgctgtatgagttatgtgcattaatgcctccatttacagcttttagccagaaagaactcgctgggaaaatcagagaaggcaaattcaggcgaattccataccgttactctgatgaattgaatgaaattattacgaggatgttaaacttaaaggattaccatcgaccttctgttgaagaaattcttgagaaccctttaatagcagatttggttgcagacgagcaaagaagaaatcttgagagaagagggcgacaattaggagagccagaaaaatcgcaggattccagccctgtattgagtgagctgaaactgaaggaaattcagttacaggagcgagagcgagctctcaaagcaagagaagaaagattggagcagaaagaacaggagctttgtgttcgtgagagactagcagaggacaaactggctagagcagaaaatctgttgaagaactacagcttgctaaaggaacggaagttcctgtctctggcaagtaatccagaacttcttaatcttccatcctcagtaattaagaagaaagttcatttcagtggggaaagtaaagagaacatcatgaggagtgagaattctgagagtcagctcacatctaagtccaagtgcaaggacctgaagaaaaggcttcacgctgcccagctgcgggctcaagccctgtcagatattgagaaaaattaccaactgaaaagcagacagatcctgggcatgcgctagccaggtagagagacacagagctgtgtacaggatgtaatattaccaacctttaaagactgatattcaaatgctgtagtgttgaatacttggccccatgagccatgcctttctgtatagtacacatgatatttcggaattggttttactgttcttcagcaactattgtacaaaatgttcacatttaatttttctttcttcttttaagaacatattataaaaagaatactttcttggttgggcttttaatcctgtgtgtgattactagtaggaacatgagatgtgacattctaaatcttgggagaaaaaataatattaggaaaaaaatatttatgcaggaagagtagcactcactgaatagttttaaatgactgagtggtatgcttacaattgtcatgtctagatttaaattttaagtctgagattttaaatgtttttgagcttagaaaacccagttagatgcaatttggtcattaataccatgacatcttgcttataaatattccattgctctgtagttcaaatctgttagctttgtgaaaattcatcactgtgatgtttgtattctttttttttttctgtttaacagaatatgagctgtctgtcatttacctacttctttcccactaaataaaagaattcttcagtta

SEQ ID NO: 216 - DNA, 1338 bp, Homo sapiens
atgccttcccgggctgaggactatgaagtgttgtacaccattggcacaggctcctacggccgctgccagaagatccggaggaagagtgatggcaagatattagtttggaaagaacttgactatggctccatgacagaagctgagaaacagatgcttgtttctgaagtgaatttgcttcgtgaactgaaacatccaaacatcgttcgttactatgatcggattattgaccggaccaatacaacactgtacattgtaatggaatattgtgaaggaggggatctggctagtgtaattacaaagggaaccaaggaaaggcaatacttagatgaagagtttgttcttcgagtgatgactcagttgactctggccctgaaggaatgccacagacgaagtgatggtggtcataccgtattgcatcgggatcttaaaccagccaatgttttcctggatggcaagcaaaacgtcaagcttggagactttgggctagctagaatattaaaccatgacacgagttttgcaaaaacatttgttggcacaccttattacatgtctcctgaacaaatgaatcgcatgtcctacaatgagaaatcagatatctggtcattgggctgcttgctgtatgagttatgtgcattaatgcctccatttacagcttttagccagaaagaactcgctgggaaaatcagagaaggcaaattcaggcgaattccataccgttactctgatgaattgaatgaaattattacgaggatgttaaacttaaaggattaccatcgaccttctgttgaagaaattcttgagaaccctttaatagcagatttggttgcagacgagcaaagaagaaatcttgagagaagagggcgacaattaggagagccagaaaaatcgcaggattccagccctgtattgagtgagctgaaactgaaggaaattcagttacaggagcgagagcgagctctcaaagcaagagaagaaagattggagcagaaagaacaggagctttgtgttcgtgagagactagcagaggacaaactggctagagcagaaaatctgttgaagaactacagcttgctaaaggaacggaagttcctgtctctggcaagtaatccagaacttcttaatcttccatcctcagtaattaagaagaaagttcatttcagtggggaaagtaaagagaacatcatgaggagtgagaattctgagagtcagctcacatctaagtccaagtgcaaggacctgaagaaaaggcttcacgctgcccagctgcgggctcaagccctgtcagatattgagaaaaattaccaactgaaaagcagacagatcctgggcatgcgctag

SEQ ID NO: 217 - DNA, 92880 bp, Mus musculus
  misc_feature (6406)..(7434): "n" at positions 6406 through 7434 can be any base.
  misc_feature (7738)..(9069): "n" at positions 7738 through 9069 can be any base.
  misc_feature (29342)..(29415): "n" at positions 29342 through 29415 can be any base.
  misc_feature (49297)..(49316): "n" at positions 49297 through 49316 can be any base.
  misc_feature (63491)..(63510): "n" at positions 63491 through 63510 can be any base.
  misc_feature (77047)..(77066): "n" at positions 77047 through 77066 can be any base.
tggtacttttgttgcaacttactgatgatgcaaaacgtatgtatgcctctcctgttttctgaataattctcaaagttagtagtcttcttttcaaccctacttcctgtgagatgcatgggtagatattacctcctgctacaaactgaaagattaaaggaccaaccgaagtccattcaagtgtataaactgtgttgggtttcaaatgcagaccttaggttgaaaattaagcaataggatagaaaaaaatctaatattgatgctattttatgaagtgtagcaaaatatcctttgcaccactttagaatgtgatgtgaagaacttacagattcggctgcccctttagaagcctgcatctgcctgtccatgtgttaaagtgccccctcacatgtgtctctttttaacactcatgcttaaatatagtttaagacactttagtaaagctcagctttgcttttacaagaaacaaaatgtgtataaatatgacctccaatttagcttcaaataaaatgaatacatacattaactaagtaaaggaggtgtaagatctaaaacggaagcagtgcctctcaaaactgagctgagcaacgccaccaacaaacggggcagactgagacaccatctaccagaggagcatgggagagaagagattaaatcagaaaaggaagaaagctaatgacataatggccagccacaaatgccacaaatgacaaacagtgtacgtaataatcgctgcaattattctgtgtgcttgctccagtgtctccaaacactgaaaacattagatctctgcttatggctacatgtatctaatatgtcagctggtgttttacctcctctttaatcccttattgcttcaagcaagttcttctaatagagaggatttaaccaggacaaacaccaatggttaatagacagaaagagaagctggtattttaagttgtttatgacgaaagaaaagaaaagggcaaaacaataaaaaaaaaaaaatacagggaagggaagatgtagcatcctcatgccacattttcaaatttccatgttaactctagaaaaagaaacatataccatagcagagctgattctaacagcttgaaatatttgtgtgaattttttataacaaacatgtcttctgtaaatagaaatattaaagcacacagaaatgggacattctagtttatctgggcttcctttgaaccccttatgtgtttctcaaagtcacaatgttcaagaggcatttactagctatgatggcttcaggtagttcggacagtgaacaagaaaagttgtgtcggattaccatatagctaatattttcaaaactattcattaacaagaaagcatatttatatttaacatcatagagttaatggaatgggtacaaaacaaaaaaaaatgcaagctgagccatgaaaaatgatcatagctggaggaaaataaattttaaagaagtgtctctttgtaagagaactcacatgataaccagtagcacaggtgggcctggaattgctatgtagagtctttccgtgaataagatcttttccaacaaaagtcacatcaattcatcccaataagtccaagttctgtagtcttggtgaaagactaagcactggtggccagcagtggtgaacacagagccaaggttcctccagacatttctctggctaccagctgagctctccaggctcttgtgttttccctcatgtgtgttttcatattaaggatgagacatgagtatgaaaagaagccattcttctatacaacctaaatggaaagatgctacaagtgatttcagtcaagcagtgtgcatggaagatgcttcaaaagatgagaaagaatcacaaacaagaagaaatctagtttgttctgtaagtgcttttgatatctttttctacttttttgaagaaccagagaaatttgacattaaaatgactaataattattaggggaatttgaaattaaatgactaatagttcttaatgataattgagtatataatatgcctcatgaattaatatacttcatatatagcaaacttgattaatctttgtaatttaagttgctattattttattctcactttacaagtggtcataactaacgtatagtgagttacagagcttgttcaacattaccctatatagatactggcattagtcccaatacactgtgagaatataccacccaggaaaaatgaaatagcactcataaaaatgttagacctttattctaaggtgaggcaactaaacgttcactgatggattttaggttttagaaaacaaagttttcaagttatccatcttgatggttctcttgctttcagtattaaataaataaccttattaagtttaacaaaagactaatcaccacttctagaaggctttgccttctataaagggcagacagaagatgatggacttagcagcaaaattggacttgtttcactgcaatagagagcccctgtatatgctgggtcaggatcctcatatgatttgattgatggttttgagggggatcacctgacccttttgttattgggttatttcaatgagaatgaagataattaaacagatgagcagaaatgaaaatatcaaaacattaagcgatatataaatgctttccttattcttcactcttgtctttcttcctttattgctgctgcttctgcttcttccttctccttcttctcttcttcttgttctcctctcctctgtctctgtctctgtcatctctctctgtctctctctgtgtctctctctgtctctctctctctctctctctctctctctctctctctctctctctctctgtgtgtgtgtgtgtgtgtgtgtgtgtgtgtgaggggtggggggtgcatgtatctgtgggatcacatggagaccaaaggaggattttgggtgtcctgctctatcactatcttattcccttaacagggtctctcattgtatcttgagcttaggtagagaccagcaagccccagtgagttttcctgtctctgtgtaagggggtggggtggggtggggaaaatttacaagcacctgatgccataacagaatttttatgtgggttctgtttgagcagaaagcattttactttctgagcaatctttgcagtccaaatgctacagaaatgtaaattgtgatttggttgcagctcaggcttattaatattttgtttgtcttaggacataatagtcaatacatattcatcaattcactcaattaacacccactgagcatcaattatacactgcataagaagtgttgaataggaagtctctgtctttcagtcttatattctagtagggagaaagaatataacaaaagttcacacaacaaatggactaccattctaacatgttaccaaattgtgcaggatattgtaaaattataatgtgttctagttgtttacgggtaaagtttggaaattaaaatccacacggataagcataaaaaatcttgagtagcattcataaactttgtgttaagtcatttagccaattcaacctcaagtaatattatgcccagatgattaattgactcagcattattatcataactctgtaaaatattaccttaaggctggtatatatgggcttctgttccagggacttaacataatgaaaaggatagatcaggtttttgctagatagagtctgaatatatcagttttattcctatctcctcttatgagataataaaatacattctctctgaggtagggatttatactgtctcttaccttgtaataatactaacttcctagagttattgatgagtaagtaccatgttaatgagttaagagtaatgtataaaaatattgaatagtgtctggtggacagatgcttaatagttattaactataataagaatcgtgttatcaaaatcttaaacttcatctgtgtacaatggacatttctctgttttaaaaaaaaactatttaatttctttgaaattcagtgcttaaattccatgagtgcttaagtctttcaagaattcataatgccccttcatgtaaattatgggatccatgaggaaaatctctcttaacattactggattccatccttaaccctgaggagctatgtgacattggatcaagttctgtaagttccagttcctcatgctgaaaaatcaagtcggactaacatgtcggacagttttatgtcaacttgatacaagttaaggtaagttaagtgaaagaaacctcagttaagaaaaatgcctccaagcccattgtggatggtgctttccctgagctgatgatcctggggtctataagaaagaaggcagagcaaaccagtaagcaatattccttcatggcttcaggattagctcctgcctccaaattcctgctgtttgaagtcgtgtccttactacttttaataatgaactgtttatatggaactgtgaatgaaataaaccctttcctccccatgttgctcttggttatggtgtttcatcacctcaatagtaaccttgactaagacaactagcgacatagttcattggcctagtgagtactttcctagaatataggatccccagtacttcccaagaagtataataaaatatctattttattcaacacttccagcaaactgagcagaagagtcaatgaatgttaagcaaattattttcataattatttttcttactgtgtagatatgattagttgttgagagtttaggctaatttttaaagcagtatggattaaagcatgagatgtttttctgttgaactaatagactaaggcatagttaggccactaaagagaaaaaactggaaaaattcctatttctgttcaatttaaaatatttggaactgaaatttaaaacttaaaatgaagtattcttctacattaagaattactaggcatgcaaaaaaaaggaaaaggaaaaatattaagtaggaattcttgtaaaatcataaattattcaaaaataaaagaacacctaccatttacaactcaaacatgcaagaaaaaaatgaagtagattcttttgatgagtaattcagttacttaggtctgtggtgtgaaagtatacataaaatgatatatgtgcacaattcttagttccttttaaaaagtgatcatcttcaagggtaagtatgagttttatttagaattgagtatcccccaacacgcacaaatacaaaagaatctctttgaagtctggggaccaaattcagaagatatctcatcccagtagttgagaaattagccagcaaggaaagccaagtcataggtctaagttctcaatgttcactatgaacctggttgacttggttctctcttcttaaaaggtttattgtttgtttgtttgtttgtttgtttcctttctttcttttttgttttcaacactaagtggttcaagggctcttcataactcctctcctggagaaggaggtccgcactgggatgggttttccttcttgaggtgtcaagcttcggctcctttgccaagatggcggccctggctcccatggaggtagcgattgtgcagcacctctggcccaggggccgtcttacagccacggcctacccgcgcaaagcggaagacacattgggcagcctttacattttccatccaagaaagggcgcctcggttttgaagctaaagagcacctctgccaaaatggtgaccgtgtggcgtcactgctctttaccaagatggcggcgagagacttccggcacgcgcttccccaatcagagatctccaagaggtcaggcagaggagaccgccctcggagtccaagtgctgcgcgatcggctgggggagagaatggggtggagccacggcagcctcagctccgatcagaagtgccaagcgctggcacctgtgggggagcaaaagttacttcctcgcaccccaaagcaacaccataacaccttactccccaacccccaggcccctaaaccgtagcgtgcggcgcgaggtagggggcacggtcccagagtcgccccagtctgcccaaaggggcgggcagcttaggggcaggtcccgcgcggcggctgcactgtcacccccacgcccctctcctgtcctagggggaccggccacgtgtttctcttggagacccggggctcgccctgggaacagctggagggagctaaacgctgacgttgtaaagatgcgtgttttgttttatttggaggggcagaggggtccctggaactcagaaagaaggcagagcgaggcactgagcctggagcagcaaatgtcaagatttgggggaggggcctccgcggggagcttggatgctggccccgaagggggtggaaggagaggtcaggagtttggggtaagaggagggcggacttcgccagcaacttactattccgtctgcaacttgcttctaggcctgcacacaccccctcccgccccgcaaggcttccttaatcacannnnnnnnnnnnnnnnnnnnnnnnnnnnnnnnnnnnnnnnnnnnnnnnnnnnnnnnnnnnnnnnnnnnnnnnnnnnnnnnnnnnnnnnnnnnnnnnnnnnnnnnnnnnnnnnnnnnnnnnnnnnnnnnnnnnnnnnnnnnnnnnnnnnnnnnnnnnnnnnnnnnnnnnnnnnnnnnnnnnnnnnnnnnnnnnnnnnnnnnnnnnnnnnnnnnnnnnnnnnnnnnnnnnnnnnnnnnnnnnnnnnnnnnnnnnnnnnnnnnnnnnnnnnnnnnnnnnnnnnnnnnnnnnnnnnnnnnnnnnnnnnnnnnnnnnnnnnnnnnnnnnnnnnnnnnnnnnnnnnnnnnnnnnnnnnnnnnnnnnnnnnnnnnnnnnnnnnnnnnnnnnnnnnnnnnnnnnnnnnnnnnnnnnnnnnnnnnnnnnnnnnnnnnnnnnnnnnnnnnnnnnnnnnnnnnnnnnnnnnnnnnnnnnnnnnnnnnnnnnnnnnnnnnnnnnnnnnnnnnnnnnnnnnnnnnnnnnnnnnnnnnnnnnnnnnnnnnnnnnnnnnnnnnnnnnnnnnnnnnnnnnnnnnnnnnnnnnnnnnnnnnnnnnnnnnnnnnnnnnnnnnnnnnnnnnnnnnnnnnnnnnnnnnnnnnnnnnnnnnnnnnnnnnnnnnnnnnnnnnnnnnnnnnnnnnnnnnnnnnnnnnnnnnnnnnnnnnnnnnnnnnnnnnnnnnnnnnnnnnnnnnnnnnnnnnnnnnnnnnnnnnnnnnnnnnnnnnnnnnnnnnnnnnnnnnnnnnnnnnnnnnnnnnnnnnnnnnnnnnnnnnnnnnnnnnnnnnnnnnnnnnnnnnnnnnnnnnnnnnnnnnnnnnnnnnnnnnnnnnnnnnnnnnnnnnnnnnnnnnnnnnnnnnnnnnnnnnnnnnnnnnnnnnnnnnnnnnnnnnnnnnnnnnnnnnnnnnnnnnnnnnnnnnnnnnnnnnnnnnnnnnnnnnnnnnnnnnnnnnnnnnnnnnnnnnnnnnnnnnnnnnnnnnnnnnnnnnnnnnnnnnnnnnncccctcgctcggtcccgctcgcctgccgcggcagggcggccctttagagtgtccgcgctccccccccttcccctccgcctcctccattttgcgagctcggagtcagtgcctggagcccgagtcgccgcccgcccgtcggggacggattctaagtgggtggaacaagacgccgcagccgggcggcgcggcgccgggacgggagaacgcgcgcggggagacgggagcggcgcgggggcccggcttgtcagccgggaacgggtgactttccgcgataggggctctcccctcccccaggaaaagaggnnnnnnnnnnnnnnnnnnnnnnnnnnnnnnnnnnnnnnnnnnnnnnnnnnnnnnnnnnnnnnnnnnnnnnnnnnnnnnnnnnnnnnnnnnnnnnnnnnnnnnnnnnnnnnnnnnnnnnnnnnnnnnnnnnnnnnnnnnnnnnnnnnnnnnnnnnnnnnnnnnnnnnnnnnnnnnnnnnnnnnnnnnnnnnnnnnnnnnnnnnnnnnnnnnnnnnnnnnnnnnnnnnnnnnnnnnnnnnnnnnnnnnnnnnnnnnnnnnnnnnnnnnnnnnnnnnnnnnnnnnnnnnnnnnnnnnnnnnnnnnnnnnnnnnnnnnnnnnnnnnnnnnnnnnnnnnnnnnnnnnnnnnnnnnnnnnnnnnnnnnnnnnnnnnnnnnnnnnnnnnnnnnnnnnnnnnnnnnnnnnnnnnnnnnnnnnnnnnnnnnnnnnnnnnnnnnnnnnnnnnnnnnnnnnnnnnnnnnnnnnnnnnnnnnnnnnnnnnnnnnnnnnnnnnnnnnnnnnnnnnnnnnnnnnnnnnnnnnnnnnnnnnnnnnnnnnnnnnnnnnnnnnnnnnnnnnnnnnnnnnnnnnnnnnnnnnnnnnnnnnnnnnnnnnnnnnnnnnnnnnnnnnnnnnnnnnnnnnnnnnnnnnnnnnnnnnnnnnnnnnnnnnnnnnnnnnnnnnnnnnnnnnnnnnnnnnnnnnnnnnnnnnnnnnnnnnnnnnnnnnnnnnnnnnnnnnnnnnnnnnnnnnnnnnnnnnnnnnnnnnnnnnnnnnnnnnnnnnnnnnnnnnnnnnnnnnnnnnnnnnnnnnnnnnnnnnnnnnnnnnnnnnnnnnnnnnnnnnnnnnnnnnnnnnnnnnnnnnnnnnnnnnnnnnnnnnnnnnnnnnnnnnnnnnnnnnnnnnnnnnnnnnnnnnnnnnnnnnnnnnnnnnnnnnnnnnnnnnnnnnnnnnnnnnnnnnnnnnnnnnnnnnnnnnnnnnnnnnnnnnnnnnnnnnnnnnnnnnnnnnnnnnnnnnnnnnnnnnnnnnnnnnnnnnnnnnnnnnnnnnnnnnnnnnnnnnnnnnnnnnnnnnnnnnnnnnnnnnnnnnnnnnnnnnnnnnnnnnnnnnnnnnnnnnnnnnnnnnnnnnnnnnnnnnnnnnnnnnnnnnnnnnnnnnnnnnnnnnnnnnnnnnnnnnnnnnnnnnnnnnnnnnnnnnnnnnnnnnnnnnnnnnnnnnnnnnnnnnnnnnnnnnnnnnnnnnnnnnnnnnnnnnnnnnnnnnnnnnnnnnnnnnnnnnnnnnnnnnnnnnnnnnnnnnnnnnnnnnnnnnnnnnnnnnnnnnnnnnnnnnnnnnnnnnnnnnnnnnnnnnnnnnnnnnnnatgtgattctacagtccagtttttctgtttttcctggtatttacatatttggaaagagaaatcttcaacttatagataaaatattttgtattgagcatattaaacaaatttttaaaaaaggaatataactcagtaaatcttcgtgttaggaattttgataagctctgttctattaaactatttaaatacgttaaaattgtagggaagaagccagtacacactctactctgcttttaaggatgcacattttagtctgtatataatatatattatttcttatatcccaagtttgaaggtaggtgatactagacaggcatatttagttgaaaatggagtttcagagtaagagcttttccctagccctgcaagacaagcagcccagcactgctttttttttttttccaataaaatgtgcataattcttcaaggttgtaccttgaaaggtttagatgtgtggggattggcacaggtgaaattgtgaatcatgaggtgtgtaaacaattatagtatagcatttatcaaacggtttatgtagtggtttccagagaggaatctctcaattgaaaggggttggaaatttaaggatcacgcctttaaaaaaaaaaaaaaaaagttaaatactttgacgtaaatttgaacctttgcaataatcacaaataacaaattacaacctccatgcttaccaaatgtgtacatttagcgagtggcaggataaacagccaagtttaaatcggtcgaccgggcagatgagctgctttgtggatgggagcagggaggatatagctttattttagaagataggaactattcttctgataatgaagactttggtttgggagttacctaaagggtttatttaataggctgtctcttactaatcggatcagagataatgtggttttatagcttattatgtccttttttttttttttgtagttaatatttgccaatggactccaaagaatccttagctccccctggtagagacgaagtccccagcagtttgcttggccgggggaggggaagcgtgatggacttgtataaaaccctgaggggtggagctacagtcaaggtttctgcgtcttcaccctcagtggctgctgcttctcaggcagattccaagcagcagaggattctccttgatttttcaaaaggctcagcaagcaatgcacagcagcagcagcagcagcagcagccgcagccagatttatccaaagccgtttcactgtccatgggactgtatatgggagagaccgaaacaaaagtgatggggaatgacttgggctacccacagcagggccagcttggcctctcctctggggaaacagactttcggcttctggaagaaagcattgcaaacctcaataggtcgaccagccgtccagagaatcccaagagttcaacacctgcagctgggtgtgctaccccgacagagaaggagtttccccagactcactctgatccatcttcagaacagcaaaatagaaaaagccagcctggcaccaacggtggcagtgtgaaattgtataccacagaccaaagcacctttgacatcttgcaggatttggagttttctgccgggtccccaggtaaagagacaaacgagagtccttggaggtcagacctgttgatagatgaaaacttgctttctcctttggcgggagaagatgatccattccttctggaaggggacgtgaatgaggattgcaagcctcttattttaccggacactaaacctaaaattcaggatactggagatacaatcttatcaagccccagcagtgtggcactgccccaagtgaaaacagagaaagatgatttcattgagctttgcacccctggggtaattaagcaagagaaactgggcccggtttattgccaggcaagcttttctgggacaaatataattgggaataaaatgtctgccatttctgttcatggcgtgagtacctctggaggacagatgtaccactatgacatgaatacagcatccctttctcagcagcaggatcagaagcctgtttttaatgtcattccaccaattcctgttggttctgaaaactggaataggtgccaagggtctggagaggacaacctgacttccttgggggctatgaacttcgcaggccgctcagtgttttctaatggatattcaaggtaagtcagcgctttgctgtttcttaagaatgatacatttaagatagtttgataaacttcattcttttatcagtgcgtacttttttctatactatttgtatacttttgcaaataactcagtacaaatggtcttttgaatgtataggcatgttagaaactggaaaggactcgtcactgcaaaagccctttgggtgtttggttaaatagtaatcgtttctcgttggtcagtgttaaagatttcatttgacaactaaatcagaattgctcactcacaagtatctgttaaagtaacatttatcatctacaagtatccaaagtcaaactagtatgaaatcaagaaaataagatgtctagtcatagaatacatttattgcacatattaatttagctgttttagaatatattattgcaagaaaatgcttgaagtgttacctttcaatgagagggttaagaactggaagtagtaacactgagtattcaatctgaacggtctgtgttttgaaactgttagagcatttcagtgtgtagggacctagaccatagtgtcagagtagtctacagcagacagttggtgactgctcctttgcctctgtaaaggagctggtgctccatgcgttcgaaagctcctgcagatgctctagtaggtaattcatgattagaattttcaggattcagttagcaagtaccatatatgtctctcttcatttttctcagtcagttatgaaggatactgatatttctgcctgacctcacaaaggtccgttagaatcgagttactgggaaaacaaaaaacaaaacaaacaaacaaacaaacaaacaaaaatgtgtaagttaaaataaatgggctggtcggcttaggttcttcctgtcccctcatgttcatgttatataaatgttggcttatatatctattttaggtgtgataaaaaagaaaacgtggattgtagtgatataagacagattaatcactagggtttttgttttgtttttgtagaaagcagtcctttaaagccttgtatgtaatcccatcaactgtttcctattagtgatgctcactgttcctattaatcagtcacttgagaagactgtacttaaaattcataagaaatgatttcaatgcagcctatcactgatctatatccttataactctttaaaattccctttttctgaaggcttcccagacactaacaaacaaaaaggtatctctttactccacacatagaaagcttttattagaaaaaattaactttagactatgatctatttttctaaatagtttaattgtatcttatcaagaggaaggaaaaatcaccttttcttttatgtatcctaagagacgggaagttaatatttatattgcctattagtagtgactactaatttatttattactcaataattaattgccccttatttgggagaaaacgattgcaacactttaactttctgaattagggatttaaaatactcccagtaaggaaatttaaatactttcttattgcataaactgtgttttaaaaatgttaagaaacaggctgtgctttaaaatttccaatcttaaatttttgacagtagatttcatgtggttgactttcataaaggaatagttaaaattgacttgattatctatagggagctgttaaattgatttataaacatgtgattacacaaggacaaataatacatttagaaaatttcttgccctgaaaaccatcataaaacttcactttttattataagaaaaaaatagtggaacccaaacttaacttgcatgcactatgaattttcattaagacttataaaatctgggatatgaacaataagtcttagccttagatcattaaataatgataatgctttaacttttacacttaatgacatataaaatgttcatgttggtgttgggcctctgctcttacagagataggcatggccatgtcagtgtggcactgtcatgtccaggaaatgattaatttcatactgacagatgatttggattttaatcactagtgtctcttcaccaggcagaataccttaacgggactgtgggcggtgcttgcaagttttacacttagcactgagaacttctattacccagaacaaagctttacccaaataaattgagacaatgtttcctttctgagcattattgaattcttctattgtttccaggcagcagccctggcagaactgaaattggttgctctctgtatatgatgcacggtagttgccaaacattagctatgatcagtgaccctgagtcaccagccactaagtcaacatgctgcatgaggccacagcttgactgaatgcgctctgacttcaggcagagaaccaggaacgccactaggaacatcgcttggaagttttaaagaaggcatacattttaatttgaattcctaaatattttctccctagaatgtcaataaaaaccacttcatattatattcgagggagaaggcaatttctacagatatgtcagtataccatgacattaggttagcatattaaagttaggaatatcatgactaagaattttgttttgtcttgtttttaaggtttaagttcattggtggtaaaacaaggtaatagttattgattgtcaggtctaatcttagtaaaatgaacttccaagtctaatggtgcaaattaaaattcagtgagcttaacataagcataattgaagcagacacacttctgtgtaatttgatttccttccaccgtgtttcgcctcagcattagtagtgtacattgcagaagataagcagggagaactaaagggttgtcagtgggattagagcttttgggtatgctgttgacattttgtttgcaagttgactctttcctgaaatgttgggtgactagagaaaaaataatactgcaagatggccctctaaacccagtgtccatggaggtagggcttcggtgagtggtatttaatgaggacactaacacttgagtcactttggacatccctcattattggtcagatctgcatcaagttttataaaagtaatgagattgaaaaattatagcaaagatgattttcccctctctcattttgcttatcaatcacgggctagatgttttctgagacagggtgtaaaggaaagagtgaaactagccttttcctttgagaggtacttgtttaatgagtgaccctgttccttgcccactaaaaattccgacagtgggtgttcagtggtgttttgagtttactgtctcttgatatccatttaatgatttctggatgtgattagcttttgagcatacacttatttgcttatatattgttacctttatggtagaattgcttcctcttttaaaagatcagtatgattgattttaacagaaatgtaagctattgtgtactcaggtgtgtcacattagtattggaatgactaaaacagagatagggagtaagcctttagtcagcgcttaatgaaattcttataatgtttctttggctaatccttgtattttttttgattaacaatttaacttgtgttcataacgttattttgtctttcgtctatatgtgtctgtaaatgaatttgaccattttccatgtattactgaatgtttatgaattttgtgacctgttctgaaatatactttgtacaaatgaggatgcagcgcaggttgtaggagatggaccaacaggaagagaaagctcacattagaagcctctaagatttgctgaggagagagattgcattaagtggtattttttccatgggtgtcagtgtgaaaggctaagtgttaaattcttggtgagttatgtaagtctcagtgcactctagcctggttagattaggaagccttcatttagatttcggttaggtctgcagcataattcttcaaatacatttttctctttactagttgtacatatttaattcttacgaggttttgggctctatggtgtgacgactcaggtcatgttgagtagtgtttactgttttgaagccatcttggtaatattttggtcaaaagtaagttaatataataagtatttgtttctgtagttctgaggtgcgcagaatataacttggctaatcccattgtataaagaatttttaaggaatgtgttgttggagtaagctacaaccagaaaaaaaaaatcactccttgactttacagaagagattgattatttctgtctgtagcttcatttagccagctgctctcatttctcctaccttggttttatatttgtcaagttctcctaaggggaacttatattttaaaacaaatctctaaagtgtttccgtactctcttttgagttatgtgatcacttctgtatttgggtgtaacctttaaagattaaatttttttatacattacaaggttaaatgaagccagtggagtcaacccctctccagtaggggagggacaaagagagaagcaacagagacctgtaatagagggagaaagaaaatttcaaggacaattacagaaacccatttggatcaactgttgcttttctaatgttaaaagctatgtgcactatcaggaatgacagcaacggtgctttcttgtgagggctaagagtgacggaaaaacgaacgcttctagttatcttctttcttgtgatgttatcaccaaaataagggcaaaatgcacagtatactttgatgccaagattaatttcatatttttcccattttaagtggttattaaagagaatgtgatgacttgaacttaacataatcactgtgccttatgttgctacaaccaaccatttcacaggccattgtgtatttttacatataaacgtgccttaggctgttacagcctcttcctatttcatagtgtacttttactttgaaatatctctttataaactatcaactgactgtggagtataactctttccttgtgttataggtttttcttttagtatattgagtaaattaggccaatgtcaacataaatgattggattctgtaagtactagatagccacttaaactatttgtattgcagtagaatccttaaaaacagttattttaaatgaaagggtgtcatcctttaacttactctctgagccaatttaaatattaatagcctattttggttgagctatgtgcttaaacatacttatttagagtaacccagctattaattttaagtactttagaatacttttttcattttagcaagcttcagcaagatttatagtgtctgcgaggcaatgtgtttaataaggaacttcttactttagatgttttttccattcatatatagaggcacaatatatatacatattgtgtgtgtgtgtgtgtgtgtgcgtgtgtgtgtgtgtgtgagtgtgtgtaaggagaggagaaaggttgaattacatgacttacatagcttacattaattattatttatatattattttgccttgaatttttattttttgttagtaatttgagtttaataaatgtgtaatatttgaaacttgcaaacttaaagcttattatgtttacttttaaaataataaattagcctttattctagtttatttcataagtttccaaaataatatttagccatggctattatgaaagtatatttgatagccaaattttgaaagctattgtgaaatgatatccagtttagtacatgatttattattttatgttggggcaatgcagcgacttatgaccttatgattgtcacatgaacattaatgctttactggtttgctatggccacttttatgttgtcatatttttatgttttgttttataattgggatttcaaccttccttcattttaattcataaaatgtggttccttttcccctacatctcttccaaataatctgatctagataatcgtaacagtaattgtaggaaaaacaaaaacaacctgggctctaaggctaaactgaaccaatttatgattctgggtaacagtgtgctttgaaatcaaagatactttctctgtcaaaatttattgaaacaccattgcgtctgtgtgtctgtataaaaatttgcaattctcttattaaactgataggccatggtatattaaagaccatttcttgacattttcttgtatagtatcaagtacaaaacaatgaacttagagttgaactttgattagatagggcttaaaatcttatttttgatagcacataatatgtaaatgttatagttggacccaagaagtgggcccttgaaatctcaaagcttgttttatgtgttaggtaagaaatcatctattcccattcccacactttccaatgagaaattgagaccatggcagtacttaggaaagaacacatacttcattagctgtgtagccagctggaaccaccctattggcagctatttaaaccttagcatctagggctcttccagggtctaaaaacaatcagtaattgacataatactgaataataataataataataagcaggtagttcataaaagtcactgatcctttcttcctagtgttagtaggttctctagtgattgaacactaattacatggcagcactatgttacatatgctatgctacatacactatataacatacactatattatatacactatgctacatataatatactccatgcactatgctacatacactatgctacagttcatgttatacacatctcgtactttcatgtcatgtgatgtcttaattctttgacacgctttattctgcttatcacattaagtgtctgagtctgtcagctccatgtaggacaaaagcagctgttacctgagttttacaactgagaagtttaagacatttaaagaaaaaaaacaggaaaccgtaatgctgatctgaaaggaattaattactatttgatgttttgaaatccctcaacaatctttaacactaattgttcaacagtgagtgtgtgtgtgtgtgtgtgtgtgtgtgtgtgtgtgtgaatgagagagatgaccaggcctctgagatatatagatatagatgtatagatatatatattcacttagtgattgctctaagtttcatttagaatacccagcattcctactggatagaatatgtaggcgccaggcgccaggctgtcaatgattcagcaggccgagggcttctgcgcaagcctggtgacctaggtttggtggcagaagccacgtaaccgtggaaaatgagaatctattccataaagtcttcccctgactttcataggtatgctgtggcaaaccccataacatgtacatatacatacacaataaaaatgataatacttaaaacataaaagaatttgtagatgcaagtttactctgaaaatttaaaaaataaattactaagatgcaaggtggtagtttcaaagctctggcagttctgttcagccaaaagcaggacatctctcatttgctaataatagttcaagagtctgcatctctggtgtaggtattgtctactaaaaaaacgttactggaaacttttttatgcctactatgtgcagttttcccaaattgggtcatgactccatttcatttacactactatctttttaaaactcagataattatcttaatattaatttttttcaagatattttttctctttttgtaggggagtacctctatcagtaaccctattccatggattttattacacattagatatactatctaaatttagtagctatactgataatccacattgctgataaacatgagactatcccctttctatttttactgtctgatactcttaggtaatcatgcatgcaaggatagtttgttaattaagaagcttccaatttttaagaataataaatactaatactttttctaggtgcataagtttggaaggattatgtaacttgtttaaagacattgaccaactttttctttgatggtgaaaaagctgcactaagggctggagagaaggcttattagttaagggtagttactgctcctgcagagggcctgagttctgttcccagcacatacgttatgcagctcactactgcctgtaactccagtttcagtgggatctgacacctttggtatctttaggcatcttcacagatgtgtacctacccaggtatatgtatgtatgtatgtatgtatgtatgtacatatacataaacacaaatgtacatatattcatgtatatgtgtgttttcattgtgtggtcaagtatggaaaataattaaatggcagtttaaatagatacatacgttattataaacctgattttgcaaatagaaacatagaaaatgtttaattagagcattatatgaaacatgtcatctgaatcccagctgggtttatgaaggacaaaataggagagtagaatagagtttttaaaaatatttcccccaaatagaaaaacccagaataaatgtttgctttctgagcccccaccttgagaggctgtgttgttgccactcttattttgaagccatcttgagacaccttgtaaaccataagaagaagacagacttagtgaactgtagtactatactaatattcttaaccagaaaatgttatttctctgtttgattacttatgtgcaaactttcagaaatttaaccagcctcaggttataatatttgtttctgttgaggattatttatgagatcagctagggtgttcccttccctcctcttccttgtccccctctcccttttcctctataaaacaggctattgtgcagcacaggctgcccccaaaccttaaccttccacatgccaggcatacagcccttcatagcagaggccgtttgaatgtgcttcccttcgaccctcaagcagatggtgctctgtggttaagtcccagtgtgtgctttcttttaagttataaaggaatttaagtaaacagcttatatacttctttttttagtatcgtgcagaaaaagtaaagattacttacttctaagcctgatttttttctctctctctctctcatgtttattttatgttcaagaaagaaggcctatctttggcttcaacttgaaaggaatttggtgactgcagatatggagtaaatacagtgtgaattcctacagtaattttcaaagtattcgaggtccttattccagcttctccatgtcctagagaattacccatttgtcactacagccaacagttccagttcactgaagttatttatactagcagtctcaagtcataggatcaatgggaaattcaaatagttactacttttagtcctcaaaatgtaaaaaggaaacttagcttctactgacagccacttaggaactgaacagtcttcatcccgagtcccacgtgcatttattctcctgtctgttgttggcagcaggttacgatgggtagaagctggcctttgagaccatggcgcatgctgcagcaaacaggtagcgtgtcttttgtgggatcattgtgttaggactgaaattcttttgactgaatttctttattgagaatagtcgaagaactgtttttatatctatatttaaaaccatctagtttcttaaattcttattattcttccccaaactgtcagatttcagtggctgagaaagagggacaaagagccaccatcatgttagggcagtattaaagtctctgggcactagagcctcatataagctaaggaggaatgttgttaaaaaagaggggaaaaatgcatagtaattcttaggattaacttactgatgacaaatgaccacttgaacaatagcatcattagacagagagccatggtactctaataaggaagccaaaaggaaaaattagaaagccacggggcggggggcgggagaaagaaaatgaaaaatttaaatttctgtctggtgactggctgtgtttcttttctgtacgcttcagcttctgtatggacatggagacatccctaagaagcctagtgatgtcattatgtttgtaaaaggaagagctacaaagacattctaggaagcagttctggagaagggtggctgggagggcactggagcatcacagaggtcttccagctgcagctgtagtgtggaaggcctgctgagctgggtgctgggcacgagtgaggtagcgatcagagcctgctggagagcagagagggcaactttcatacctcttcctccttccttccaatttgctttttaagtgtttgcccgaagaaggcttacacccttgctggagatggagcatgtggtgaagggtttgtggagatgaatcaggaatgaaggtccattcagttactgggagtaagaagagagtcagaaggcttgctagaaagaggatgaaaactcaaaactgacccatttattaagagtgagcaaaggacagacttaaatcatcgttagataaaggagtatgactgcacttgctaccctaactctgtgcatgcaagaccatgctatgtttccttgcctaggactgatttttcttatacctatgtgggggtgtctacgtattttctgagaggaatatggttgtcagtgtaggtcccctggcacatggtctacgcctggagaacttttatctgaaatactttccccaaatatccacgtatttccctgtccttctttatttaggtcacacttccatgtcacttgcataagtgggacctctgtctctatctcaaattgtacatcttccacacctcattttgtccgctttggtgtatttaggaaccttatgtcctctccattacaggtttgctccactcctaaatcccaccatcgaaagagtaggacagagatgctgagtgtgtgaaggagcaaacttggctcagaaatcaggaagaaggctcagactttagtctaagaaaaccagtcttaagacagtagttgatgcaaatagacagaacatacatatggttttaattgttgtctgcttctaaatttactctaaagctttaaataggattgatccttgcagtttcttaacaagttagggcaataaaagcttgtagatgatgtttttgagggcgtttggttgttttgtttgtttgtttcctccactatataatcttctgctctagaactttacatttattattcttttaaaatttcataaatgtatgcaatacatcttaatcatatttgaccccattctgtctctctaccacttcctggctcctttccccaatgcatcccccagttctctgctttataaaagcagccatgtccaagaagagattcccatatgcatatggctaccaggatttattattctagcagataagccaaaaaaaagtactcatttatatcaacttacctagaaaggtaggcaagaaacaatggtttgttttgttgttttagatagtttataacactgaatattctagaagaggaggagtggcccattttctctcaattgccaaattgtctttcttcaacttatgggtgttttgggtttgatttattatacaatagtatcatcaacttaaaaggttattagaagggtctatcttctaagtatttcagataactgtctaatttggcaaagacagacaatgatgatgagaataataataataataatgccaagccacatagggtttaactattgaaagagaattagatgaggtcttttaagagtgaacttctctagagttgaaggaaaagatgggaatagaccaaggacagggctttagagggcatccagaatgaagctacaaaaaacactcagtgaatatctggagaattaagagataaaaatcttaaaatgggacgaggagaaagtatttcatgatattgtatcaacttgggctaaagacataacagagtttgatagttaaatgtgtggtggtgtccttaaaacatacaaatgtcctcaaaaattaagtcctaaatgcatcagcaaagcaaatggttagtttattgtctacaataccttttaatttgaaatataggttaaaacatctcatagaaaataccatttgtctgacacacgccatgaggccgtgaaaagtgagatgcattagaagtaagggcaaaagctaggatcccgaagacaatagatggtgatgtgcatgttggtgcgtaaaggttcttcattatcagtatgcccagaacactcatcactaaagagtgttccatccctattgtgtagaacatggggtagaaacatgggattccagctggaggaaacctagacctggcacaattagtatcatattgcacatcagacttccttggtttgaatcttttaagacctatgtgaccttgatcaaatttacaatctataaacctcagttccttcacttttgatatggacacaaggagacactgctgttgaatggcacttacacagcacccatgagacattagcactcattcttagtgatgttgcttcagactggagagcttcttacggcttaaatgctacatggaggtctgtttggccacagcaccaagcgagtctcagtcttaagatgggttcattatgattttcagagtaattattatacttaagtaacggtagccttcacttctggtagtgttatcagatgtatgttttgacttacatatgaaggggaactaaaaaaaatgtatgtgtgatagatgttaaaaggagcacttcctgtcaggctctgtttaaccccttccatcttcccactcagccacatgagctgtagagagtcactcacaagtacaagcttgtttctttcttctccatgttacaatttaaatagcacttttacaagtttacaaataaggtttggccattccctccctctccctttcctccctcattctactttagtgaagagattgagattagattttaggataaacattgttgcgaagtgcctacttggtgggctaaacactgctgtagagcgccctttggtgggaggcggggaggaaggaaggagacggattctggaacttttgtctcgctgaataaaacgtagtgcgccagaaactgtgcttggaacagaatgagagcaggcagctttgggatggtagcacacaaccacttgtgtgtcagttttaatggatccagtttctacaactaaaatttatgagaaaggttaggggtttgtgtcagataagcacaccagtgaccagacatgctaaaacatagggagcccctccaaaggattctactagtcctaaatgaaaataaaggaacagaagtggggaaagagatgtactcagcaggctgggtaaggcaaatagtgtttgctttggcagcaatggcaaaggtaaatgctaaggtttaagttgcaaggacttcctgccgtctgtagaccactcactgttgaacctttcagtgataactctaaaagggttcgttacactagatcatggagagaggggagacaggtgaatcatgtggtttctgcttccctaccagcttctcttctacttttagggtaactttttgaagtgtccttagatgatgaaaaaacacactcgactttgtctgtctgtcagtctgcttattttgattaacctctgttctctagttctatcagcttttctggaaatgacatgattgtatttttcttatacctgaataatgctccattatggagatacaccttatgctatatccattcatctgttgatggacacctaagccaatcccacagctctgctgtcctgaattggacaacactacactgaagtgggaaagcatctcttcttccatccacagtcgtgatgttcattgtataaatacccaggagtgtggtttgatcaagtgtcattttaccttggggagatatgcatactcttttactggtttatactcgcaccaatcttacagaaggatgccccctttcccacatctttttgagttaacagccattctgaatttcagtatcgttttaattttgattttcctgctggttaaatacattgagcattttttttaaatgttgaaaccattcgtactgtggagtggtgactgttgatgtggttatttctggctattactttgctcttttgatattaggcttttctgagatcttcatatagcctgaattttaatcctttgtcatacaaatggttggcaaagatttttctctcatgctgtgagctctctctacttagttgattgtttcctaggctgggcatagccttttgaagttttgtaatcgaattcttcaattcctttgtttcctgtgctactgagtcctattcaggaatagcctcagttgaacttttgaaatattgtccctatctgtgcttctagtagtttcaaattttggaggtttacattgaggtatttaatctattttgagttgattttttttatatagggtgtgcaataatgtgtagttgtagtagtcttcctgcctgtgcctatccagtgtccctagcaccacttgttagagaatcttttctcctgactctgttcctgagtctgtttttagcactttgataggaatccattggctggagcaagttggatttattcctgggtcctctgttgtattcctttcatctgtggggttgtttgtttgtttgtttgtttgttgttttgttttgttttgttttgtagcagtgctgtactgttcttgttactgtggcctatgtaatttattttgaaattaactatgtgatgtctgtatcattatatttattgattaatgatcaatattgctttagtagtcctgtgtctctctctcacacacacacacacctgaaattccaacactcagaagaagcccattaaaactttgaagccagcttgattgtaaaggtactatttttaccttcttagttgggtttattctgaatttcattcacttatattctctcttctccttccttcttcccccttccttccttcatttcttcctgtgtcagctattccttattttgtccgctagatcaaatttcttcctcagcaaatttattattggtatataggaaaaatactgggttttgtttcctgttgctttgatgaatttgtgtattggctgcaagagcctcttagagtctctagagtcttccaggtatgtaagcagggaagcttaactcccttcttatgtatacccatgtcctttttctagctcaatgggtatagctaaaattccaagtacttcactgaatgaaagtgatgagactggccacccccgtcttggtcctaattttaggggaaagtttttctatatttctccattcagcaagatgttggctatggatttgtcatgcatagtcattatttctgtcctatgactttcctgtgtcatatttagttttctactgtaaagggtgttgattttatcaaaggcctttctgcatttgttaatgactatatgcattttattcttgattatatttatgttctgtattgtctttatttgtgtgtgttaaacaattcttatgttcctggaataaaaccaagttgacatggtatttgatcattttaatgtgctgttgaattcactttgcagttattttattagaggtttttgtaggtggttcagaaagagtagtttataaagttttgttctgtctcaacaggttggttgcagagtagcacttgcttcatagtgtgaggtttgagaagggttagtggtctcatttctggactcagtcgatgagcactgacatttggttctttgtaggagtctggtgtatcttagcagaaactccaagtaggcgggagcttttcactcttaggtgattgtactctgttctcgttgcttattgttgttctacttatatctttatatcttcttggctctatgttattaggtcatatgtacctagaaaatcaaccatttctttaagatttcccaatctattcatgtatacttttccaaaacattttctaataatgctggtatttgttgttacatttttatttttgtctctacatttttaagtgtctttcagtgaggttgcctcaaggattgttaagggttgtcttttgggggaggtgggggcgcgtggagctctaaatcttttctctagattcattttattgttctaaaaggtgtgtgtcggtgtgtgcacacatgtgcgtctaggtctgcgctcgtgagtgctaggcatcagattcctctggagctggaggtaacggcggcttcgagctgcccagcacgggcgctgggcatcacactcaggtcttctgcaagaacgctgtacgtccttaatcacccactgtgccgccagccctgagactcaaccttgtttcaggtttgctttggattattctctcgggttctacctcttgtattgatgcactcatcttataatgtctttcctttttattgattttgagttgtttgtaccatattttgggagactttgtgatgtgttatcaaattattttcatatctgtatccttaatgtatgacatacgtagctataaactttcctctgtgccgttcttataatgtcccacatggcattctggaatgttacatttctagtatgcaaacattttcctcttgtctccagtgctcctctgatcaaacgtagactgtagtcccccatgcttgtcatttgcccttctcctttagtgtctgagacagggtgtctcagcaaagctgaaggaactcactgtttcacctgagctgactggccagtgagctcactcctcttcaccagggttgtgaggttacagttacccatgtgctacctgccatgctgagtacctcagacagttctggggggtcggactcgggtgttcatggttgtataccaggcctcttaccaactgagtcatctacctgattctttcctggtgttctttatgtgaaataataattctcttctctcatttcaaatcgaagggatctatttagtacttgttggagggcagatctataaataatatatcttgtagtacctgaattagaatatttgaatcccctttagttttcaagtgtagcattgctgggtacagaggtctttgacatttcattctttccatactttattttttttctgttacattactctttctttctttcaaatagtatttattgttttaccccagctgtcttctctgagactctgctgctcagaaatcatgtatgatgaattaacttctcttgccttcaggattctctgtctgtagatctgatcgttgaattatgctgtgcctaagtgcagatcttttaaaatctgacatatttggagttctttgggtgtttgagcgtctctcattccatgtggggttgttctgctgatgttgcatgttaagatatttacatgttccctctcttcatgacgttatatttatgtgtctgcagtcataagtgatgacatcccacagacctctcaaactgttgagtgctttccagaccctctggcagcatactgtcaaaggagctatccgcaggctcgctggttctctcctctcctgttctagctttaacatttctatcccattctatttcatctcttctaactctgtattcatattttcaatatagggagatatcaattttatatttcagttctttagacatggttttctttatgccagtgtgtatatttgaaatacttagcgcataagctttccaaagcagtatttctctgttgatttcttgatgtcctgttcattgtctagcctttgtttttcacatcttttatttttattgttattgaaatgagacattttaatatggattcatccctaaactgaaatccaaaatcttaatattttttttttgagtgctaacatgatagttttggattctggagtattcagatttcatgtttctgttttagaggttttgagccagcacagctctatacgtgtttcaaagcttagaaaaggaaactcagtaagggtccctctgcttgtagtgtagtaatggcagtcggcagttgacatgctttcctccctctcctgcactagttcttgataagcattacagacagtgtttagtgtctgttctcagttcctctataaagcttatattcgtgtacattgtaagtatcctgacatccctccctttcgcccttcccttccccctctcccctccctccccctctctctctccatatatgtgtgtgtgtgtgtgtatacatatacatacatacacatatacatacacatatacatataaatacacacatatgcatggatacatatatatatacatacatacacatacatattttaaactttgtgctcatctaatagttgaacagaaatttcattaaatgcataggagcaaagcaacagcttaccagtgtgtcgagaggtcctgtgttgcagaaagnnnnnnnnnnnnnnnnnnnnnnnnnnnnnnnnnnnnnnnnnnnnnnnnnnnnnnnnnnnnnnnnnnnnnnnnnnttttcccgagggcattatctagtttatttactattccttgcagctgcaactgtcacctcagggtgcacaaactaagacatgtcaataaatgtcctcagtagctctccctgtccaagtatagcaagctacatcaagccagttttatggtaagcaaaataaagagaatccttttgaggggatctaaacaaagtataggaggaattctgtgcctctgtgttatactgaagactttggggaaaggcgcattcattccctgccagtcacaagcattgtaagcaggtgccatgtttataggagcaggaaatttctttgggatttaatcaagattcttccttttctagaaaataacttggagaaagcttccagaaatacatcttttattccattttcttttgtgactcttttaagatgtaaaggtgtctagcctgtggtgttgtcagactgtgggtttaactgaagcacatctgagtttaaagtacaatattctgttcactgcccggcaaagtgtccgtccagatttgcctttcaacctggtcgtcgtactttacccctgttccgcgtgtaggccatgttgctttagactgctgggttttgctttgtttctggttcactagagttcaggatgaacgttttcaggtctcctacagcggtggctttcagcctgtggtggagaggagtggccacaggccatgtgtttctgttatctcacttgcaaatagctgtgaagagtccctgggaggctccagagaaccttggaacatgtataggtggattgctcagctttcactaagtattctagggagcgttcggacatctaggtgattagaaatgcttcttattgtcttattaaaagtgttattctatgtggcagcaaacattttgggttaagcttcattttagtgaactggtcaacaaaggaagctgaaagtttgagacttaagtctggccttgtggcttcaaacagaaagctcacaaatgtaaaacctacctgggctatagagaaaattcagggacagcctgggctactgcctctcaaaaaattaaagcattaagggcttaagcagtagtagaatgcttacttagcatggataaggcacttactttaatcctgagaaccaaagaagaaattggagactatcatgtttgttcaaaagagggtttactgtgtatatttgaggtttataacagtgttagcaatactcatagaaaataaaatggttactatcttctatcatatataacattgtgtgtcacaatggcaataaaatctgcattaaacaaaaatctaataaataaaatcttgatatagacttcatgtacacatttcttaacttgtttgttcttttgtgtcctttgaccaccccctccattgcccttactcccttgtatatctttgaaacctctttcttttcatcatgtgatcctgtaaagttttaatttttgcatctgcttattttatttagcatactgtcttcttggcccacctgtgatgtatccattaacatcctcttttgtgtggctaaatggaggtctgggagtgtatagtagattttctttatccatttatcattgatgggcattgtgatgctgcagggacatccttacaaagggttaattccatcacccagaaattattgctgggttttacagaagctgtgtgtgtaacattagaaacctccatactgtttttcatgtacctatgccaatctacaccctgacctgctaagaggtccttttctatacatggtcaccaatatttgcctatttctagtctgttttgtcctgttttcctttcctgtcttttctcttctcttctccattccaccccaattttgagattagatctcattccatagcccaggctgatttaaactctgcaatccttctgcttctcaagagaattatgtcctttgtgggagagggctttacttagtctttgctcattgttggaactgggttgtttgttttaactattgagttgtcaagatttctttctaagatgacacatttctcccttccctttcttgcctcccaacccctccccactgtccttcgaatccatgcctatttttcctttgttatcgcatgtatacgtgcatatacatattttttcctaaatatctgttcagcaccactttgtgtgcttttctccaggaaggctatctctatctaccatacccagatttactcagttgcagatactttttttgtatggttgaggcctcatgggcttttctctgtccactttggcatgtccattggtacagttttggctcagctcatgttcaggcagtcttcctggtgaagctttgtgggggtagtttctgacattactaggagacagccccatagcaaaccctgtgaccctctggctcatacacagttctgtagccccctcctccacagcgttccctgagccttaggtgtgggagtgttttgtagatgaatccactgggactaggctccataacactgcattttaattggtgggggttttctgcagtggtttctgtcagctacagagagaagtgtctttggggcaaagacaatatttatctgtgagtagaaggacatatacttagtagggactatgttgatttggattttataattggtatgtcttcaccatatatgtgatttgcaaatattttttactagtctgtgggctgcctcttgttttcccctgtattttataaacttaagtttagtggagttaaatttatgtgcttttgcttttataatatgaacatttgatgatatattcaaggaataactacaaagaccaatgtcaaagacttttacctccatattctttattagtttatggtttctgatcataggacttttgtcctattttaactttacttttatctatcatgtaaaggtacatctaaaattccttttccccccacatgcattcccaggtcttgtttatatctctttattgccactgtcaaaagtccatttccttctagtccattgccctattttgtcagtgagcatccgttttgtctcagtgctatattgttttaactgtgtctgtgcagtgtagtattcaaccaggaagcttctaacttagtttcttagtattgatttaggtgtgcattgtttctccgtatgaaatttgggattattgtcttctatatgtctttggctaccacaataggaattttgatcaactgccctaaatctttattgattgcaccccatccatgaacatactcagtgttcgcattgtctcttttatctgtcctcaatgatttatagtttccagtgtgtacattttaatttcattggttaaatgtattcctatttttttaactataaatatcattttgctttttttttaattgggctgatactttagtttaaaaagtggtatagatttttttatatgcttaaaaaaaagcaagtttcagaacttgctttatatagtgttatagcactcacctctatgatgtctgtcttcttctgatctgtctactaatggaacgatcaggagtttcactagatacgattaagggggtgggggcaggaatctctggtaaagagaatttgtatagcacaagtgtttttaaatgtctattaaaagagtcagtaagagctggagaggtggctctgtggttaaaagcactgcatgctcttcaagaaggttcaatttccaacactcgcatggcagctcacaaccatctgtaattctagttccatcggttctgacgtactcttctggcctttgtgggtaccaggctcacagacacaaacacacaagcaaaacatccatacacataaacaaaatttttaaaaagtttttaaatatcagcaaaaagtttgagaggattaataaaaagataggacaaaatgtaaatgtgtaaatatttcttcccgtgaggtgatgaggtggtgttgctagcaagaggtacagctccaccgctcagtatggcgcatgaacacaagcaccctcaacaggagatggctccgctgtgtgcagaggacagcactgctcattttgcttggtcagatgtttggtcaacacagcatctgctggtttctgttacaggtcttgaggttgtagtcagccattaaccaaggtttcagagtcagttttgattctgaaagtcttaactgtcaacagaagctggggacctggagaaggtgagagagagggcctaagaatgccttagagacttgatcactatactacttataagagagggttgcattatgatggaactgtgaaagtgtatattcctccagtgaagttaactaagatatcagcccagcattttctgctctgttgagtgttaggaatgctatttccgaggtggtattctgcaaaactataaaaggaaaagtgtgggtggtgagagaagaatgggggcacgacatccccgtttgtagtttaggagatggggttaagttgcctttcaataattcagttaaatctgaggattatagaacttttgtaaaattgtttagaattttgtacttattaaataaaatacttatctttcaaatttatccaattttagcttttcatgctgacattctcaattttatagacagtatattcttttattcaactaccaaagtgattttttttattgtgtaaaactgaaaagtagacactaaaagtgtatgtaaataaatggaattactgctataattattatatttactgagtcaaatttcagtttcctttgtgcaaattcaagtatagcatttgtgtcgacaagccactttgctttcctgtcgcaaatacactaataacacattatagatagaaaacttccatctcaggggatgaataatagacgcttctgtagcccttggctctgaggacgcacctctgctgttgtaggaggattttaattttattattttatgtgtttggatattttgcctgcatgtgtgcctatgcaccacttgcatgcttagtacccaaggagaccagaagcgaacattggatcctcgagaactagagttagaaacagttgtgagctcttatatgggtgccggggcccaaacccaagtcctctggaagggtatccagtgctcttcacactgagctacctctccagtcctgccgtggaagtatttttttcccatcttgtttataaattaaagcttttttcagggtaataaatgttgtacctacccaattactaactcttggaaactgatcaaagtctaatttaaattttataacatagtgacaatttagaaataacccatgagttgtgggttacaattaatctcagcaatttgggtgtgtatttatttttaagctcttaaaaggaatgggctaggaatctatttcagtggtggcatgcaggcttgcctagtatgtacagcattggagtccatcctggctggggtcaggagtggtaaaggaaagagaaaatgaagaagaggaatgggggaaaggaaagatgaaagtttaacctaaatgtgataattaactataagcttttttagaaaacaactacctagaaaatagtttactataatttagtaataaacagaccacattcgcatgtaatctctatttgaaagaaacaaatcaaaagtaaaggcagaaaaagaaacagcaatccaagtaccgcagagcctgagccataagaccactgaagagaattcacgaagaaacatgctcagggcagggcagccgagatacccactagctctgatgggctcaaaaactaaaacttagcagcctcgggttgctgatagagtaatttgctttgccagttgaacttggttattaaatataactgcttatgtacgacaacagaaatatcatggtttgtttatagtacagtaagaggtgtataagttcctaaaatctactggaaatttgactaggaaaaaataaataaggaagaagctggaaaagttaaatagtacagagtagtgctttctgcctgtcttcattaggaggctgagagggcttcaggttttagaaggatcttcctttttctacagaacacgaccatgacgtctgtcatttctgtagttcctcaccttttcactgcatacatgtggcttgaaatcattttcattcctaatatttgttggtttgctcataggattataggagacaagttatagtttaaagttgtcctatagtataatagataaagagtttttattacctgttacccctgaattaaactagacaatgagggatggaaaaggctctaaagggcttaacaccaatcaccatagctcttgggcatagactcaaggcactggttgtttttcttacctacttctattttgataatcagagcttttctgttttctacatactctgctctttggttttgtactattgtgtttatgctaagtactattaagaacaatttcaattaaattatttaaagttaaaatctattttaaggtagatgtgtggtctttaaaaagtatagttaaaatttacttaaaatgcagaaaaataaccattctactgttgagcacatcttaggattgtttattaaaaatcactttaaaatgctaggttataaaaggtggattcaaagattttggagttttcaaaataatacctacaaagtttaataaagctcttttttctgttagtctattttggaaagcattcagactgtgcctgtaagtactgcttctctgtgatggttggaggcagggagtaaacagcctactgtaaatgggccccatgccagctggctccaggcagcctcaagcttgtgacttacagtcagggttaggaaaatgctttttaacttgttcatttccgtttctgttaaatgtgggagggaaggcacatcatttattaaataccatgcaagatcttgtaaagcttacatgtcttaaaagttatcagtaatatcactgaatctgaaaccctttaacaggaaaatttggagtttttagaatctatttaaccttctccttgttgaatgtacttggggtcatatttgggacttctttgacctgttgtcaatatattcagtttactgcctagtagtattttggggtgaaattgtatggtatttaagaaatgaggacttttttcattttgtttgtgtgataaaaagctaatttaaaataattattttcttatttaaaagaggaaaatgctcaatttgttttcaaagacacatcacacctacatcttagtttagagctgataaaccactttaactacctaactagctgagtatcactcccatgatggaaaaatggaagcgaagattctggataggtttttgttcttgttgaaaagctagtcaaaaaataattcttttcttgaatattctgtcaattattttgcaacttgggaaacatttaagtatcatgtaaccaaattattgactcaattttctaagattgctgtagatatttatttacaggaataggaagtaagggtttgtgtgtgtgtgtgtgtgtgtgtgtgtttacttgaaaaatggagagtgaaatttttcaacattgaaatttccaaatatatgaaacttgaaatctaagaaagcactttgttttaacaataagattttaaacatgatgtaatatagtaatttccattatagctcttttacttttaaatactttattccatgcagtaaaactctaaaagaccaggttggattattagaagcaattaaagcaccatgagttagtgtacttttcagtgactctaaactaacacagtttctagatgtgcatgaagtgtaccgggttttagatggttggttttttctgcttggtttaaaactatggaaacaatttttagaggacatggtatcttctagtaagctgtttatttctgctttctgaactaatatttgcaagttttcttgggtggtataactcctatttccccttgggagggcagcagaaatgtatggaatataggttaaaatttggattattggttgtcatttcatatgctaatgtattatttattaaaattagaatcggtggtgatgtaaatgattctaagaaactagtagacaaagtaaggacataaatgaaggtattgagcatgagtgacttaaactaattaattctgacagagacactaactagacattattttggtagtctgtgcccaagtacttagcatataaagtacatgtttgtcacccctaagtgtgggaaagaccatggtgagtgcaaagtggattctacagctagtcaccaattcagtcttcctcactagctacaggacttcccagggcagagtttgggagactggctcccagaaagccctcataatgttctgagaccaagatctgaaaagaagatctatgacaacagtggtctgcactgtttattttgtggctttaaagaacattttgataaaaaacaaacatgagaagttaagatttctaaaatatgaatgaaagtaacttttccctaattgagaacatgataaattgtaattagtaaagaaaaagtctcttggcattgttttataaaccaataaaatgcatcagggatagctaattcttgttgtttcatgaagttctaggttcactagggtaaaatttcaaagtatcagtcttagcaagatagtttgtttctttatagttgttacaagtgatcctaggagtcctttgcaactgtctgccatagagagtaattgagaaccaagaaacagtagtggggacaggagcttcttagctaagtgtactctgtcatcagagcttgataacaagttatgtaacatacacatgattatgcaaaatactggaaagcagtagtaaactaacaacactaaagtcgtggaatatgttatatgactacataacatatctttcttggcctgtgacctttatcacctctcagatttgctagaggcctctaatctgtctgctgttaacctgccttgagtatgacagttgtgaaactgggaagtcaagggactggctagttcagtgtagtatgttagaatactctcttctaactaggaagcaccacacacttccaagatggctattgctttaaaagaaaaggtatgtgtgcctttttcctctttcttgtcattgtactttgctgagaattgagaaccagtggtaatagggtggaaatgttttctgtaacagattattattatgaaatccattattaaagtcttaaaacacctccccctttgttagccacatgtttcacagcacaacaaggaatatatttttatggcagatttttctcttagatgttgttgatatagtactagactaaataaagacccagatcgtaagaaaatggttctcatctgagtgcccataatttacatcttggctctttaaatgtggttaattttttaaagccattatttcgaggcagacttttgaattgcagaccatatgaaggacttgaagattgagataagtaatgaggcaggggttaaatatcaggtagaggggttggattttaccaacactgttagaccttaggagccatataaaagcatctaacagaactgagggcactgctgttagtgttacaaacagcagtgctctggtcatacctgtatgcatggatagcaagggttcagaataaagacctcactgaagttgagagggatggtatacatattataaaggcagcaaagaatgattatgcttctgagctaggctgtcttgctccatactgtaccttataaatactactctggcagttagatataggataaactatgtttggagggaggtgactataccacactttagaggtaagagtgactgccagactgcctaagatctgataagaaacaaggcgagaatgagctaaagtggccacaaaagaaatggggagcagtttcagaaagctttaggaggcagttggttagagcaccgttggtttctatctttactcattgactggcttttcaaaaattactactcacctgcttgtctctaaattcagtgacactctctggtgacctactatgcagaagttccatgctatataccagtgtcctgtttataaagatttctttctaaggtttttgtggttcaaatctctcgggctcctttctgttagttcctttgttcttccgtgtttgcagagctctttcccagaccctcttctcattccattcctcctcctgataaataccatcagttgctttatctagtgtctcaaatctagtctctaacctcctgacctatatgtataactacctactggtatcttatcttactgacaggcctctcaaactcaatatgtccaaaatgcatttcctacttatggtatattctagttccttttgctcctttatccagtacctgagaaggtgcattatgtcttgttagtcccctgcccgaggctgaaatctagacaatactcaagttgccttttctcctccctgcctatagtttttaagatgtgaataaatccttcatgaagtgtgtgtgtgtgtgtgtgtgtgtgtgtgtgtgtgtgtgtgtgtgtgtgtgcatgcatggggtggaggtgggggtatcaaacccaaggccttacaaaggaaaggaaaactttctacaactgagatacactccttcattcccactttctgtctcaattggtcctacgttaaggcaggctccaatgatttttaagtggattactgagacatcttgactggcatccttcccatcttcagtgtgctccctattctgtactatagctttcaagcatgcagatgagatcagatcactactgctcgtaaggaacaattcaactgcccttactgcccctagggtagttggacacttttatgtggcttgtaagatattgccttaattaggtttatcttgctgagataaagaccttgatcaaaaacaacatggggaggaaagggtttatttgaccttaaggttgtgctctataaagaagggaagtcatggcaggaactcaaggcagaaactaaagcagaagccatggaggtgtgctgctgatgggttgttccctctggcttgctcacattgcctttttaaataacccaagaccacctgctcagggtggcaccactcatagtgtgctaggtaggccctttcatatcaaatcctacaggcagtctgatggaggcatttccaattgaggttccttcttcctaggtatctctctttgttggggagggggagactatccaaaaatcaaaacatgacaagtgtcatgatttggtaagatttttattagatatttttttcattcctcctcctccttttcttcttactcctcctcactcttctttttgtatttggttttaccatagctctctggttcttagttacacaagcagcatcaggtaaaggtcgaatcagacataggatagttactgccacaaagtgtgtgccatcattgtcctagcatattagatacataagctaaacttcttttaattctttctttcctgctgcagtgctttttcataataccaatctttagacttagtacttggcctccaaccatctttcctttccattccttcttcattctccaaaacctaactaaactatcccatcttcaagcaagaccatttctgatgcccttctctgtcccatcacaacacttggcagtcacctgtcctagcctttatctcactgttttacagctaaagaaaaacagggagtgtaagagcctgtgacctcacagctccaattgcacagtgactgggaatttgcataaaatgtctccaaggatgggatgcacggggagggaatgcttgggggttctgttttctatcaaccatccagtgagcagtcagggaaaatacttattaatgcataaaatttttctgtataataaaaccattttaaattgtcagcagaagaaattcggttttttcttgtgtatttgtttgcagcgtgagaactggaactgagagccttctacacactaggcaagtactctaaccactcagctacagcctgagcccgtcagaggatttcatattttatttaagctatcgctattttaacaaaaaggacatgtttacaaaatctttgttgagtgaagagccagttaaataaataaatgaacacatgaaaatgttcttggaaagatggaagaaaacgtctagcaaagttttcttttagagttaaatgtactactttcttaaaagtatttttaaaaagaaataaaatttgatgtaaaactcccaaaggaagagcaggggagatggctcaaggtaggactgttggtacaaacatgaggacttgagtctagagccagctggttgtggtcctgcatgtgcatgtaaccgcagtgctgtggtgggcagaggtgggagatcactagggtttaatggctactaacctaacacaggttcagtgagagaccccgactcaaggaaataaggtggaacatgatagaacaggacatttgatatcttcctttagtctcagcacatgcatgggcctgcatgccccctccccatatataccatgcatacacacattaaaaataataatatcaaagtcaaacccctactaaaagcaacttgggaaggaaggtgtttattccaccttatacttgcagcccacactgagggaagtcagggcagggcagggcaggaccctggagctgatgcagagatcatggcttctgcttactcccttgtccctcttggcttactcagcctgcattcatatagaacccaggaccaccagagggggcaccaaccacagtgagcagggccctcccatagcagtcatcagggaagcagtgctgcccagtgccagtcttaactgaggtttcctttccccaaaggcagaacttgatttgggttgatataaaactggcctctcatttcactaatgctctcagagttttgtacaatcgccctagatattgtgtgtctgcactcgcacatttataagatagctacctgcagatgaaggactcattctacctacatgttttatttattacgctctctaacttccgcctatgtagtatttttgtggtgattcctcatggaactgcaactaagctatatccagagttggcaggctatagtctcagatccatctggcccttaaattaccatgaactaatgatttttttaaggtttataaaatacaacaaggaaggaatggcataaggctccagaacctcctgagaagtcttttgctgacagatgtggattgattgagctctataccatctttatgtaggtgtctaacattgctttcacgttagctgtgtagttgattttcattatccatggtaattagattctaaatgtgggagtaagtatacaagaaagacatttatagtatgagagtctgaatataggacggcagtacctctcttttctctttggaatgaacttttcagtaaagttaaatttttatcactgtgtgcttatctgcagatagtcaggatgacactgcattttgggcattacaaataaattttaacaaataagaaaacttaaaaatataaagtcaaggtttaattaaaataagttgtaatcactgtgttagtatctaaaagtaaaattgccacaccttaagaacttgtggtcctctctccttttgtgtgtgtgtgtgtgtgtgtgtgtgtgtgtgtgtgtgtgtgtgtgtgagacagtctcgtctcatgtacctcttacactagcttcaaactcactatgtagctgaggttgcacttgtattcctgatgctctggcaggcacttaccaacgacctggcttcaaccttatcctgctttttaataattgagtggtatagtttatactttcagtgggcacttatcttaaaattattagagctctaaagtatgctagcagagaggttagctgatgcatgagaaaaagtcaacaggtaatctggcaaccaggcactgtaatcccaggactcaagagacactttgagagttcaacgcttgcctgggctagtgagagactcttgaaaacaccattaaaggaaaacgtttttaactggaatggttaagaaaccttgaaagcccagacatgaagtgaataataaagaaccacatgtttaataacgctcgtgttacccatggtagggcatgaggcttcagacacgcagtcagcagtggggaagtgtttaaaaggcctcacctgggtgtgtgcttaaaacaaggctcttctgaaaggtagacagtggagctgtactgctaactgaaggactttattttctaaaacaaaaaaagtttgagagattgcatacaagcaacatgttagctctgtcaaatatacagttacctacctgaatttattaatgtcttttcacagtaatgatttgtctttgaggtttagtctaaatttctaaatggaaatgtatttagggagaatagctttttgaagctgttccctcagtaccaagtatggaatgccagcagctgttggctcttgtttgtttgtataataaaatgaatttccagaagagtcactgtgtatcctctaatagatattagaaatgacacttagcataatggtatttaaaagtaaagaaaactattagccctttgtcactgtgatactctttaaaataattatcagagttggaacttcaaacttagggcactggtttaaggtgtgagtttgcaggtgcaaatgttaagtgtttttaaaatagaagtaagggggagatgtgacatcacctctagtttcagttcttctaaatcttcagggtgagactgtagagagggagtcctctgctcttagcttcccttgctcaagatggtagccacatgcagctggcagctcatcatttgattgccttaggatcaagggatgctatagggcatcctgctttgctgaccaaaactcatgttaactgtggaggaaaaaagggaatgccatacagttgggcaattaatcaccaaatgcaagggtgaatgcactgagtagagaaatgtaatcagagatgctaggaataatgaagtgaaatagcaggtggattactgaaaggtgtctgtggacctgatgcagtcaatcccttcaaacttcagtgactgttcccagaactaggacagaagcaattgcagtcaacatgaaagtaccacagtcccccaaaaagccaaagaaatcttaaacggaaaagaagatagtactgaggtacaacaaagtacctcactccaaattatatacagggccaacgtagcaaactgtcactatactggtatgaaaacaaaaactgtggaccagtgaaccggagtatcaagaaataaactgatagtagcatagctgtctatagtcttctgatgcacatggggccaaaacatacactgaagaaaatagcctaacaagttaaaactttacatctgcatgaaaaaaggctgaggcttgattttacctctcaccctgtgcaaactcaaagtggatccaaaactggacagaaactttggacctgctataagaaaacacagagggagacatgggacgatagatgcagtggcaaggactcgttcagcctgcttacccaggaccacttgccaatgagggacactgcccacagtgagctagagagctagagccatccacataatcaaaaaataccccatcggcttgcccacaggccaatttggtggaagtatttttctcagttgaagtatcctcttccccaaatgattgaggcttgtgtcaaattgatataaaactagccggcacatccaagaagtaatagcaaaaactagccattgcatgaaattagaatgcagaataggaaagaaatcagtcttcagcatgaagagacagcctacagagtaggaggaggtcttcaccagctagtcaccagagattataatccagaatatagaaagaattaaccatcaggaaacaatatctgaaaagtgagttacagtgcaagtggccagtggatccatgaaaaggaaatgtccaacatctgaagacatacgaggaaaagacaacatacttcagccaggaggactaccatcaaaaagacaagcattcctttatttttgtggtgcctgctagggttggctgtgacaagatgaagctaagtatctctctcccagaactggctgtcagaaactcattgaaatggatgatgaacgcaacaagcttcatacttcctctgagaagcaagcacatggccacagaagtagatccttggtgaagaggaaagggctctgaggtctgaatgggtgggattgacaaaaaagattttcctgtgaatcaagtcatcctgaccagagcatagcatgcctgttgtaactaattacttaccccatccctatctctctcacaaacttcctcctccatctccctccccttctcccctgaaagggtagaggcccctctgtgtgtccccccaccctgtcaatatcaagtttctgcagggcaaggcgcattctcctactgaggccagacaaggcagcctagttagggtagcagattccacagacagggacagcccctgctccagttgttgggggacccacatggagaccaagctacacatctgctacatatgtgtggggaatctaggtccagcccgtgcatgctgagtatggagcactcttgttataggctaagaagaactggagaaaggaaacacaagtctacttacgaatgcactcagtggccccaaaagaactagcagaacctgaaagattttcagtccctctaaagaaaatgatcttccctagtttgcagtattagacctggaactcccaagagaagcccataagcaaagagtaagtccaagaccaaagcacccaagaactagtgtcctgtcactccacatgtcctgtaacacaagcatggacaaattgctatgtagaaacaatacaataataaaactgaggaagaggctatagaatatgttaaacttttagccaaaagaatgaagaaagccaaagaatacaggaacatatatccaagaggcatagactgtcctcacagcttctactccttagtctgagtctagccaaaaattagtctttattttaaacaattgaaccttgaaaaaagtaaaatccagcaacatgtctactgtgttccttgtagtcaagaacagagtccctccttagcatccatgtgaaacaaaaggcaagcctgtgcctgtgatctcagggctacagaggtagatacaggacagctctgggactggctggtcatacagcttagccaactggtgagtccgaaatccattgagagacctgtctcaaaaataaactgagaagtgattgaggaagacgcccaactcagtgtatgtgtatctgtttgtatacagtgttcccacagcaaatagtggcaaggatggcaggtagttatattttggtgattattctgaggtgcagtaatatttatttcttttaaaatgctttgctaatttttttagaattccatatagtgtgttttgatcaccccacccactcctccctctaagtcctctgagattcacccctctcagttagttaaccactagaacagccctcagtgcacactcacaggagtcagtcagtgtacaataaagatgcctacaagcccatgtttgttttggcactgctcaaaatagtcaagtcatgaaatcactcattagtggaaggaaaaagaatatgaagtatatatattctttgactatgcacagccactaaaaaataaaattgttaagcaaaataaaccatacttggaaaagcaaatgtcatgatgaaacccattattttgtgtcattaatacatatgagttacaatttatataaaaatattttaaagtctgcaacttgaaaaatgttacaaattatttccccttttataacatgagattttgaactttatactatttatcttggtaaaacaattaaaccataattattacaaaatatttttatatctttgaacatgtaaatatttaagtaatatcatctgttgagaacggaaactgcttgttataaagaacttcactctctagaaagttataaatcatagcctatattataaatcatagaaaccaatcacattcaaaggcaccctcttaatgctcctgtagaaacactagaaatccactttcaacagccaggtaacatgtccctggaaagcagtcttacttgattatctgaatttaaatgttttctgttcatgaagaaatatgtcattccaaatattactctgaacactgaatgactgcaggatttattttcacaatagttttcctgtgagtgttggaaattttacatctcatcgttttgattttggtagtaaactctgtttattatttattattatttttacttattcactttgcatcttgctcactgctccctcctggtcaccacctcccacaacccttcacccaacacctcctctcctctgtgtaccctcccccaggtatcccctcaaccctggtacctcaagtctaggcacattctctcccactggggccagacaacaaatcccacatatgggaaacagcttttgggatagctcctgttccagtttaggacccacatgaagaccaagctgcacatctactaaatatgtgaggggacctaggtccagctcatatatgttttttggttggtggttcagtctctaagagccccaagggtccaggttagttggctctgttggtcttcctgtgaagttcctattgacttcagggcctgcaatcctttctcttattctttcataagagtccctgagctccatccagtgtttggctgtggctgtctacatctttctgcattagctgctgggtggagcctctcaggacaacgtgcttctatctgcaagcataacagagcatcattaatagtgtcagggattgttgcttgcacatgagatgggttttaagttgggctaattattggttagccattccctcagtctctgctccatcccctgtgcctgcatttcttgcacacaggatacattttgggtcaaaagttttgtgattggattggtgtctctatcattccactggggttcctgtctagctacagagggtggcctcttgaggtttcctatccccaatactgtgagtcacagctaaggtgaccctcactgattcttgggtaccttccttaccccaggtctctgtctagttctggatgtgttctctacctcctcacccctaccagttgcagatttccattcattctgatggccatctctcctgtccctccccatacctgattctgaccccatcccctccccacccagccccctcactccatctatctcttatgactattttattcctccttctaagtgaaatccaagcatccttgtgtctgtagagtgccgtatggttatcctgtattttatggctgatatccacttataagtgaatacataccatgcatgaccttttgagactggcttacctcactcagaattatgttctcaagttccaaacatttgcctaagattccatcttacacccatcagaatggctaagattaaaaacccaagagacagtacatgctggcaaggatgtggaaaagaggaacattcctccattgatggtgagagtaaaaactcttacagccattctggaaatcaatttgacactttctcagaaaactgggaatagttatacctcaagacccagatataccactcctgggcatatacccaaaaggcattctaccgtcccataaagacacctgctcaactctgttcatagcaactttattcataatagccagaaactgggaaccacctagatatccttcaactgaagaatggataaagaaaatgtggtacatctatactattcagcagttaaaaacaaagacatggattttgtaggcaaatggatggaacttgaaaaataccatcctgttgacatattttaagacttcattttagcctggtgtgatggtatatgcctttaatcccagcacttaggaggcaaaggtagtcaaatctctgtgagttaaaggccagccttgtctcctgtaagtaaggagagtctgtcaccctnnnnnnnnnnnnnnnnnnnntaaggaaggtacccaagaatcagtgagggtcaccttagctgtgactcacagtattggggataggaaacctcaagaggccaccctctgtagctagacaggaaccccagtggaatgatagagacaccaatccaatcacaaaacttttgacccaaaatgtatcctgtgtgcaagaaatgtaggcctccccccctccctcacccccctctctctctcttctctctctctctctctctctctctctctctcacacacacacacacacacacacacaactgggattgaacagttggtttttttctctcttaatccaaagaatgtccatatttagaaaaattttgattgtctacatttatagattgtgctagtgtctgattattagtcccctttctttcatagtgtatataacttaccatttccttatatcttctataatgaactgcaggggcttcataaaaccagactcttggtcttcctacttatactacagtcctaagtcacagcatgtttcttggcttctgattcagagcttgatctgttttccttgtatctttgctcaggatttctgattccatcctaaacagtttgagggatcttttcgttgttactgttttggtaatgtaatgtcataaaacctttacttgctatttccaatttctcttcgaatgtgattatcagatatacgtccatggtaacttttatacccatatgacagcaacatggagaatgcagtagaaggcaacaaacccctgggccgtaggtctcttgtcaggagctaccaagttgtgcttggaccactgcaacttggttactaatcttttctttggccccaaagtggcgatattaatataacccattctcaaagataatatcagggtacgataatgaagtcactgatgcagagagcatctatacgctgctagcacaccaggttagagctggcatcaattaattttcaggtcaggtgaaataactaaaaggaaaatacttaaagattcttaaggcatagtatatttctgcctacctggtctctttgttgtccctgctgttttgagcgtgtctgtacttttgaacatggcatcagtgagagcactcatgactcaaccattgcaccatcctagacaaacatcagttggatgtgtgccaggatacgtgataaaatacagttcccctgcttcttcattttctttgctatgaaactctgctgaagttcagcccatagcactatattttatttgacttcatagtgaacattgaagacatttgccctatttattgtaaactaaataattctatattcttcaacaatttggttttgtctttcctaacaattctactttttgaatattcaagaatatttaatagcatgttagtattgaataatgccatcataatttcaactctttggttagaaatatacagtacagggtacatactctattagaacagtctgcagttggaagacttactcttttttaaaagagataagatttgtggtatttgtgagtcttgtatatagatgtctcttaaaaagactagtggtgaatagttatttttatattattattgacattcatgttaaaaagtactcagtgtaaagctttgcaagttaaagaacatttctaattattgagttaacagagtcagccaagtcttaggtaaagcaaagttgagaataagtcagtttacttcctttagcattgcagcatccccttgctcattgaagatgtaacttgcttaatacatcctgagtctttcccttcacccaggagtacaacttgaacttcctatgtcatgggcctccactgttgctgcttgtattttcatagaaaaagctcttgagtttcctggctgcacaggggggtatggatgggtgagtgacaaaaggagaacttccggttttgcaacagagactgaagaaaaagaaacactcatctgggagaatagaaaacatgtagggaaaaggaaacttccctcaaactatcacttctatgtttagacataaaaacagtattcatcaaataataatagtgtgttgctttttagagaaaccttcagagactgcaactaagaccttggaaattgcaaggcagtgacacaattgaaaatcttaatagaacaagtgaaacagaaaaataagatgacccagaaataaaacaaataggaaagaatataggaaaataagaccagtctgagaattcaaaaaagaaaatgaaaaaaaaagacttaaaacaatagaaggaaggaagtcataaaaacgagggtagaaaggataatgaggagattttctgcttatttattttgaatttttaaaattaagtgaagtccaatatggtggtgacatgcctttaatctcagttcttgggaggcaggcaggtgcaacataatggtacactgtctcagataaataaataccacaaacaagacaaaaggctactactaataaaggatattatgaaccaaaacatttttacataagaatatttaagaagcttggagttttgggattcctagctagagcaagaaacagcacattaccaatacactggagggttctagagtgactataagacatcatcacactctgctctttctctataaaaataaccactaccctgacaaatatgacaaatatacccacactatttacatacttaaacctttgtccctggatttcatataaatagttgtatgtgaatcttatggatgcaatgtcattttttgttttctttgtcttaacactgcatactatggtggttgatcctgcaaggatagaactttatcctcagaggtagaacatgtagatgcttagatatctattccacaattgtgagctttgcctagtttccagtttttgagtctacagtgaaaaatgctgctgccagcatccttaaatgttttgtgatacatggctacttgtccattgatggaggtgctgaataaccagacttaacaagataatgtcagactgtcttccaaactgaatggacttcttaacttgcttcctcctcattgtttcttttctaccaaggttctaggtatacaagagacattcagtgtggattaagtttgagacttcataattacaagtgaagttgaataactttttccctcttgtttattagctatttagagtccctgtgttataagtttatatatgtgttgtgttgtttgcttgggtttgtttgggataggagaaaaagtgtccatttttcaagtgagtcttctattcttttatttgaaatccacatttgacttaacctaaagatatttctatgtggttggagtgctttctttcccttagacacagcttacttatttttgtctgctcacaggtcccttttagggtaaatatattttactgaacgtttgaatttttcaggtaagacttggaccttttttcaaaaagagttgtaacccagcctaccatttctctaaatagaagcctgtaaatgttctagctaaactcttgatcaacctttctgattttgataattaggtttcctcctagatattcctgctatttaaaaacattccagaagtctgttttgtagactattgcttatatcttctcatctttgaaatcgtaaacctcaaaaaattaaaaataaatggcatagcttttccaagaacctaggaaaatgagaataaagttaacacagggtgtcaattttagttagagcaatatctagctggtcattttattttaaagaatcgtgcacttcaataataatatagctagcaaatactagtatcatgtgctcaatattggtactgagagctctaagcattagatattcatcattagatttaaaatattttaaaatttaagatgaaactttatagacatatccttaaaggattaaattctaaataatctaattctttacaagagaaggcaagcaccacaaaataaaaacaaggcaatttttatcaactaaacattcaacagactcttgtgagaagcaaatgtgtgcaagggcctatatatgctcatgcattgcctactttactgggatcacgtgataggcagcttaataatacatggctggtatatatatatatatatatgtatatatatatatatatatatatatacacacacacacacatacacatatatagcagaatgatattgaataagttcaaggtgtacataccactgaactacataaaagaccatgtataaaagaaacaagaaaaaacaccattatggtacatatagaaaataccattatggtacatatagaaaatccttagctgattcattggatatccttaccttcctagaagtttatcttaagcaaattaaaattaaagtatgaccagtagctggagaatgattaaactgtgtctgaatcccttaacatcatgtgacctgagagtgggatgcttgtcttcagcattgatgaggccctgagttttactcccagcaacacaggaaccacagatggttactctgtaaccctagcatgtgggaggtagaggctgaacgaccaaaagtttgatccttggctccctagggaattcaatgccagcttgggttagacaccctgaaaaaaataagattatctatagatagaagttttctcaatttgttaactaagcaaataaacagtgcccccccaaaaaaaagtgaggtacacagcaattgcctctggttttacatgaaacaagtacatgggaacttgtgggaagaaggaaatgatgtgtataaggaggtctgctggtgaacagagatagccttattttctaaatgtttaaactataattctaattcagcttaggtcatttcattatttctcactgtatatttctaagtggatctgaagcaatattcttggagtagattttggattgggtacaaagaaacaaggaaaaaggtttcaggccttctgtattcagtaatgaggacaatagtcatgtagaatttattccatatttttcttcctaactggatgaagaaatgcaattgctttagcatgtacagttctatagtatatgatactgttcattattagcaagaagaaaagcaaatagtctcctattcaagatgtaatcctgtagcccacaaagacagttacccagctgactccagcttcccactgtagtggctatggagcccctgcttcctcgcctgagagcttcctcaaggtactgctgttccccattccttttggcttcagagtttgggtccatttcagcaattacagtgactttttcttccactgggttccattcttgagccctctgaggaaagccaacatttcaagtaaggatgatcctcaccggggttcctgccctcttccctgttcatagaactggcaggttccttcccaatgctaattaaggagggacctttcctaaccaccccactgtaagcataaaatagtttcatttcatgactctcagaactctcagttgtaaaggttcagatgttgcaatataaataaagtccatgattctgcaaccaagattggcctcaagttcagttcaatcaccatctcagccttccaaatactgctgttacagccatatgccaccaactctgattgtgtctgtgattcttattgtaacagactgttgcaaaaatggtcttggtaaagcctagctcttgcaggaatgttcacctaacagttcccagtccacttggtaatgttttcatgttctcaacagttgccagttttcaatattaaagatatgctggagaatcacttaccaacaataagacatttagtgtcaggctactaaggatttaagctctaaattaatggcttgtccttcatacaccaacttatgatccgggctttagcaagtggttttgtatcctgtcttaaactacggatgacatttttgaaacagccattgttttttggtggttcttccataacctccacccccaagaaaacctctgaaatgttttcttttcaccttattatagcataatgtagtactttacacatgaacacattttatgtacaattgcagagaaacaactacgtagtttgacaagaaaaaaaaaaaggctgtaattcaaaagttcactgagttattttgataaactcaaaaatactttctctgtagaaaacagtaaaaatgataaaaatttcccagtaatttaagccaaagtgaagctgaattatacatagattgttttaacttaagaatcccaaagaaacctgaccttcattgttcaaagagccatgttttacttaagtggtataaagtgcacacagcatgtcgtttcattagcttgctacagcattaatgcccaagtagtgaattggtttttgttattaaagcatattatttctaatttcacattgtgacattaagtgatgatttaatttaaagtttcagttttaaacattgctttggatttttttaaaatagtaaaacatactttcagaaagtcccaggtttgggagcttctgttgacaaaaatgttctctctgcagtgtagtgtccagtaactttgtttcctgtgtacagaaccaaccactcacatgagaacacaatctgagaaggcattctcatggctaatatttacatccttgcacttttcagtgtaaggatttttaaaatattttaatacttcgatgaagtaaaactttgagctttatttgtgtcagacagtatagtattgcacttacattttaaaattagagtattttgcctgcctgtatgtatgtaagtatactgtgtgcatacttggtgccatgcaggtcagaagagggtgtcagatcacactagaactggagttacagttggttgtaagccaccatgtgtgtgaaaggaactgaacctgggtcctctgcaagagcattcagtggtcttaatccctgagtcaactctccagtccctgggtctcctcttaaatatttaaaatagcttagagaggggaagacaaagttaaaagcaagtgctgttactgttacttggctgtaaatgctcatcacagttaaagctgccagacagcacatttccattgcattaccaggcacagtgccttctcagaaaagcttctgtgcccctggaacttttacattcagaaaaacgtctctaaaacaaaaagcacacacctatttttaagtttttcatcttcctatgttgtttctaaaatggtagtaaattcctttttagaagaaacacaagttactgtttgaactatagtaatctacactttatttactctgaaacaaaaacaaaacttgttttctattttgaaatttacaaaagtaaaactacatggtagcttatattgcttatcttctgaattgagaatatatgtgggtaaatcagagttcatgtgtatagcacacaacatgtatgtgctgcaatattagcctctgtaaattttgatatttacataccttaccacaaggactttattttagagcctgaaacaatttccttgtctgtcatttcaccttggttgttgtgcagtagatttctaccctacagttattactgcattatacatattctacaacaccatagctagccaaaagtgcatacatattccatattactctgctatagttagccaaaggtttgtcattggtatgtgctaaaagcgaaacagcaatcaacttgaaatcttgaattcaaattcagatattccctcctactagtgattgatgtgtagaacattctgggactggtgatctttaaaaacatccctgtgtcttagttgtcacactataaatgtgatatcttctctcaggttgcttcatggatcacagaatctgtctatcaagtacatagcacaaaatgtttaaataaatgctatccgtttccttctaattgagttgactatataaattatactttgatgccctttaaactgaataatgagaattacttggttgaacatcaggtaacaagttaacatgctcatactgtttctctaatagtaggtgtgtcttctatttacagatctgacagtgggaatagatacttccccctccagctcaggctggataatatatactaccttcattttacttaaattaactatttagtatctgttctacttttaaaaatgacttctctatagctgtttattttatttacgaatggactctgaaattcaaactccagcatccacccagtacatgagtccaacatagagtatacttcaaggctcccctgagatcaagaatggtgttgagcgcataagacatgtctctgcttctgagcctttgatgtgtagtctccatgattatagtgttttaatgactcacatgagttttaaaataaaaatgtgaaagcaagtgtaccagattaattcaatataataaggatctaaagaaaatgtaaataccatgagatgcttttgtatcattaagttacaaatattaaatatttaaaaagtaatttgttcctctctctccttgtgttcatggctggcctctacttctctattctctctctccctctctctgcctctactacctcttgactccctatcccatgccctgaataaactctattctatactatttttaaaaaagtaatttcttctctattcacagataggggaggatgtattagaactgaattttcatatttactacagtatatctctctggtgcccatataatcttaaaaacttcatgaaccttaaaggctactaccctccagacccctactaggcaaatgtcaggcatagctgaattcagatccaggtagtgttttatgatacaactttgatttttaaaaaatagcttaatctctttattcttgatctataaattaaacttagaattatttatgtaagttcctagttttgaggcttggcatatagaattacagtctgtaacttgtaacatggttattactgtgatgggacattttgtttataacctatcaaaaacatcttttcagctgggcagtggtggcacacgcctttaatcccagcacttgggaggcagaggcagacggatttctgagttcaaggccagcctggtctacagagtgagttccaggacagccagggatacacagagaaaccctgtcttggaaacaaaaacaaaacaaaacaacatcttttcagccttttagtagcttttccatccttctagaggctccttctttacttctcgatctagtagtgggaataatgtgtctctcctctttatcaaatatgtctattgtttctataaatatccaagggaggagtcagaagactcattggcacaacagaaactagcagctcgtgctaacatgagaattaaactttagcctttgatgaggtaaagaaaatggtctcaaacaaaactgaagcctgttctgagggattttccttcatttgtgtgaaatatagatacactgctctgttgctttctgttcttagagatacctctggaaatttgaagctatgctaattgtgcagcccgagatatacattagtttgtggactatttgaaaatttaacacagttataaaataattctttgcctttaaaatgatagaactaagctcaaggagttccctacttttactttgtgttactgagacgtaaagtaaaaagcattgcttctcaatttcaagatcgtgattttgtcaccgtgtagtggcagtactgggtcaaaggttaatctaatataagaaagaccacactggtgtgtaggaagcaagaaggcatgattgaactttactaattaattgtctaacttaggcaaagccagtgtctacacctgtaatgttagtccttttaataaagaatgctgtgtagtacttagcttcaagcttacagagtttcagctctgtattggatataatcttataaacacctatcatattaggtgcttcaaattctctcccaggtcagataggatattttatttagtatatttatgcatttttatttttattagaaccacatataagaggcccatcatgtgaagaggggcgcaagccatggccctgggcctcttcaaaggagttactagtaggaagaatacacacatatctaaaggcaccaaggccactgtgtaaaatattacacagtgattgagtcccaaaatcttatggttcagaaatgccacagtagatgcatcatgataggggaacaggtcttagcaaagactcccaggaaaaacatagtgcatactaggcacttcgtaaatatttatacaacacaggttctctgaaatgacacaccaaatggtttatgtttgtagaaagacacatgattggaaaaacgaaaggggccagactgtgagccatattgtgctcatactgtacacattggaaaagcccctagacttttaattaggacaggactgactgtcgacagtgatgggattggttggaatggaaagagaaaaagctaaggatgggacaacttaggataaatcactgcagtggtgaaagatgaacatatttaaggtggtcacagagaggacaagaaagagaaaattggcatcgtgtataaggataaaaaatagaacttgggctatgtctccaaaacaaacaaacaaaatagtaataggtaagatatgagaaatgaccaacatggcaaaatctcttttacatgtaggctaccaagcacagtaaatgattcagatctctctttaagggtgtgatggtgtataccaatgtgatggtgtatacctctattcctatcatccaggaggattctggagtaggattcaaagttccactgtcgcagctaacaagtgttagttgcaggatgataactttattcttggtatgattttgcaggttcatgtggactgaaccaagtcaccatcctatttcgagttgaagtgcacttcaaagatgtgagagagtagtaactgaccattgcctccctcatagccttgccttctgtgaagatggcacgcttatgattctatatgacaccttctacagttcagatactagcaaatcagttatcctgtgtgttcttaatagtgaagaagcatcaaatgtagtaaaggcacatcttcattctagaaatagccatgtaataaaaactttgattcattgtccttaccagtcttccttcatcttataccattgcttctccttaaaacttgtgcttcttaacaaacactcaagctaacagaaccaagaacacagcatgagaaagagagtgcatggaatttacaagatttataatattttctcctctataaaagatgacacagttgttaagaggtaaatttcttagcataagattcaggctcaggattgactgttcatgagaaagaaatacattgtttcttcctgtgaagtagattagactttaggtgaccaatttattctcaaatataaatatataggaccccaaagccatttacaggtcagagtttactctttcttgctgaaacccacttagaaaaggcggcctgcttagttggagcatatgagcaaaatactttgatttttatggtcaagcaaatgatgcccagagaaccagcaggattctttatgtacacctaaaagtgaaacctttctccataaatgcaaagcagagagaataataaccagactgctttgtattgctaagatcaggtcaaatgtgtcctactgaaaccatagaacagaaatgcggtgaaagtcttccccttgagtacttctgtgttggtctgaaagctaatacatagcgtattattaaacaaatcagtaatcttttagctaaagcaaagataaacagaaagtcagaaaatatagtcacctggtgtgtgcagctgagtgtttacatttttcctaatgaacagataagaaaagtacaggttgattttaatgtgtaaaattcagcttctactgctagccctagaggggaaaattaaattactgactcaagctaattctatcgttgataaccaggcctgtaaagtctctggcttctactccattttgaacctctctttggacttgtctgaactcaaaactacagaggcaacatcaatagaacaatcatttcttttaaaaaattttattagtttgtgtgtgtgtgtgtgtgtgtgtgtgtgtgtgtgtgtgaatttcacatatgactgctacataatattatcctcctctccaactccaccatgtcagcccctgccccaattccttctctagttcacagcctctttttcttcagttattagtggtgtgtgtgtgtataagatatagcctgctgagcacattaccgctgctcagatgaatgtcttttagggatgactacttggtatttgataaccaattagagggcatgtgccatcactgacaaagactgattctctttcagcagtagcctgtagccatgtttaatctagagattaaaccctatgagatatccttcttccacattggcatgtcagctgctcttgtcattacttgggtcttatttaggcaaccataccattgagatttcatgagtataactgtcctatccatatagaagatcctatctcagagctgctcctgtcctctgtctcttataaacttcctgctctctctgaatcttagctgtagggattgtgatctagctttatcactccagaatgggcaccacacactttaaaaacgtttctagctcttgtctgattttattcattcatccatattagtttatgtgctagaaacttgggccaagtttcaaggatctcaccactgctgacacctaaactaggccattctagtaggcggctgtcttgtgcaccagagggtgtttaccacgtcttgggcctattatcccttgcaaaactagcttttcccccatttgtgaggaattaaaaacatcttcagacattaccagatgtccctaggaacaaaatttgcccctattgagaattacagtccgatagcatttgcacagaatgaggagccaatgagaataaacctcctccattagtggttgttaaaattaacccagtgatggcagctgcatttccagggtttccccatggtagttaatacttgtttctgaggtgggttctggcactgcactgaaaaattactgatttaaattcacctaaactgaaggcttaactcaatcacaacacttgggtttataaaaggttaacatctcctgtcctgaacaaaaaaaagcttcaagtttagtatacaataacatttctttttactcagttcattactatcccatgtagaaataggacagtagaggatttatagatactaaatgattaccacactcttatattatcaccacccatgttctccatgacagcagttctcacagtgtattcaaatgacccctgagaatctccaagaccatatcagaatatttttgtgatgacacttgcacttgtgaacttaacattttttttgtatttttttatttactatcacctcatttaaagggtgtcaagtccactgagcatccttgagaaagcaaaaagttgttcattaaatatcaacccacgtatctttaatatgtgacaagatagtaagagacaggagtacttgcactgttaccaattgatagtggttatcagaaatactggtgaaatacgcagttactataatataactttaatttctgccatagctttttatgaaagatatttgttattttccttggaactaatcattttgttggaccctacccctccttagtcaaatttaattaatttatttatttatttttaattttattaggtattttcttcatttacatttctagtgctatcccaaaagtcccccatgccctctcccccactctcctcccacccccactcacacttattggccctggcgttcccctgtacttaggcatataaagtttgcaagaccaatggacctctctttccactgatggccgactaggccaccttctgatacatatgcagctagagacacgagctctgggggtactggttagttcatattattgttccacctataggagtgcagatccctttagctccttgggtactttctctagctcctccattgggggccctgtgatccatccactagctgactgtgagcatccacttctgtgtttgctaggccccggcatagcctcacaagagacagctatatcagggttctttcagcaaaatcttgctagtgtatgcaatggtgtcagcgtttagaggctgattatgggatggatccctgggtatggcagtctctagatggtccatcctttcgtctcagctccaaactttgtctctgtaactccttccatgggtgttttgttcccagttctannnnnnnnnnnnnnnnnnnnatcagtgagtacatatcatgtgagttcttttgtgattgggttaccttactcaggatgatgccctccaggtccatccatttgcctagaaatttcataaattcattctttttaatagctgagtagtactccattgtgtaaagtaccacattttctgtatccattcctctgttgaggggcatctgggctctttccagcctctggctattacaaataaggctgctatgaacatagtggagcatgtgtccttcttaccggttggaacatcttcgggatatatacccaggagaggtattgtgggatcctccggtagtactatgtccaattctctgcagaactgccagactgatttccagagtggttgtacaagcttgcaatcccaccaacaatggaggagtgttcctctttccccacatcctcaccagcatctgctgggacacttcatactcatcaaaggtaaaatcttccaagaggaactctcaattctgaatatctatgctccaaatgcaagggcagccacattcattaaagaaactttagtaaagctcaaagcacacattgcagctcacacaataatagtgggagacttcaacacaccactttcatcaatggacagatcatggaaacaaaaactaaacagggacacaatgaaactaacaagttatgaaaaaaatggatctaacagatatctacaggacattttatcctaaaacaaaaggatataccttcttctcagcacctcatggtaccttctccaaaattgaccatataattggtcacaaaacaggcctcgacagatacaaaaatattgaaattgtcccatgcatcctatcagatcaccatggactaaggctgatcttcaataacaaaataaataatagaaagccaacattcacgtggaaactgaacaacactcttctcaatgataccttggtcaaggaaggaataaagaaagaaattaaggactttttggagtttaatgaaaatgaagccacaacatacccaaacttatgggacacaatgaaagcatttctaagaggaaaactcatagctctgagtgcctccaaaaagaaactagagagagcacacattagcagcttgacaacacacctaaaagctctagaacaaaaggaagcaaattcacccaagaggagtagatggcaggaaataatcaaactcaggggcgaaatcaaccaagtggaaacaagaagaactattcaaagaatcaaccatttgaggagctggtcctttgagaaaatcaacaagatagataaacccttagccagactcactagagggcacagggaaagcatcctaattaacaaaatcagaaatgaaaagggagacataacaacagatcctgaagaaatccaaaacactatcagatccttctacaaaaggctatactcaacaaaactggagaacctggatgaaatggacaagtttctagacagataccaggtaccaaagttaaatcaagatcaggttaatgatctaaacagtcctatatcccctaaagaaatagaagcagtcattaatagtctcccaaccaaaaagagcccagaaccagatgggtttagtgcagagttctatcagaccttcaaagaagacgtaccccctccttagaaatatcatagcaacaatatttgcagctttattcatctatttcttagaaaaatggtcagtatagcccaatcagttccattctgtgtgacaaaagctggtttttcccactgatgtctatggcacacagccttccgtgcagcctcccacatactgagttcttatccgctacatctagatggcttcctgaagcctgacttggactccagattcttgccttttttagttctaactctgttgccatctacatagatcacacctcagtgacctgaacataagtttccatatatcctaatttctatgtgatcatttggggtctactgtcctagatttaagacttaagatttgtttcccttaagaaaatagtgctgggcagtggtggctcacacctttaatcccagcactttgaaggcaaaggcaggcggatttctgagtttgagcccagcctggtctacagagtgagtctacagagaagccctgtcttgaaaaaaaaaaaaagaaaagaaaaaaagaaagaaaatagtgaacttgtatgtttcaattctttgctgcaagtactagacatctaaacatgttcacaggtgacacttctcagcttcctgataaaaactagagctcatcagagcagatgattcccaaaagctataggactgtcaagtgggactgcccagaccaaaacaaatcaggattctccctggtcagccacgtgctactgtttacatgacctcaactagggatggtcgcatcttatcacaaggttgttcagaggataaatgagattcccttatggaagtgttctgaaaccatgatgtacctaaatactgtttaaaagtcaaatatatacatatattttatatatgtgaatattatgtttaaaacaggcaaacgaaacaatatagaattgaccttaaaaatctttaaacaatgtgcttattttccataaactaaatatacaagcaacttgctgatccctaaaaatagatgtcagatgagaagagattggctgaccaggaatcggcgcgtcctcagaacagaagctctggaggctttgctcccctagaacattgctactctgtgtgctcaccccaggaccatcgcacttcaatgtggaactctgccccaaagcagcagctttgccttacaagcctgcattaaccagaggctgtgcccgaccgaagcagtcatgtctggacagtctcttccattagaggttcacactttgcactcagtcctcttgcccaaacccagcaaggaatcaataccttgtgatatggaaacaagcagacagtctattgacagtgctcaaagaacaatgtgaaacctattcccagaactagatggtgggagtgctgcactattgactaagctactggataaacagacagttggcagcatgcaggaagattcatttgaggattaaatttagggtgaaccttgggtttaatgacttacttaatagcattctaacacatttttgtttgtttctgtctttcttgagacatggtttcacagggtttcccagaactggcagatcccagaccaggctcaattttatagcaatctttctgcttcagcctcctaaatgttaggattagagggataagtaacaactcccagctacagttactattttttaatttttgttcctaaagaagcaattgaaaaacattgttatttctaactagagaaagaacaatttttagttgtgaatgtattaatctttttttttttttttgcatttgaggcttagcgcttcgctaggctgaaataaaagcatgcataaaggatgaagagacaagcaacatccagtctagcttattcctaagtaccatctcttagcaaagttcatagaaagagagtgctgatgtgtgtgaactttcctatataagtgataaacaacatgatttaccatgaggagttccacacccgacgagttgatactattcatagtttttaaagtctgtttgagaggctagaacaagacgaggaattggcaatataatcagaagcaaaaggctagattatttttagcaacacatatgcttttgttccagagtcagcatgtatggcaaaagttccttaggacaattcaatattgaaaatcattatcacttaatataagatgtaatagctaatttatcaatttttcataaaccttcgttgattcaggtaaaggataaatatccattgttcttccaaattctctgaaaaattaaagactttgaataagaactttaaactaataatatatcttgcttattcccgtgctggtaagaagtttgcagaatgaaagtgagccctggtcagagcagcagactcggtttttgttgttttctcaggatattctgattgagagagagcaggacggttgtactcagaatagaaaactagagggtttccaatatacatggtaatgtttctaaactaatctttcccaagtcacaagaaactatcgtttcagctaggatcaaactctaaggtgctatgtggttttttttccctatagtagagagcatggatagaatgataatgagattaatgtaagaacttaaaaggaaaagaagattgatgtttaagggttagaaggaatttaggggtgtggtagagatatcatcctttcttggtttttatggtaattatgggtctaatccatttttttaatcttgccaatcacatacttagaaaataatgcatttttaaaaaatagtaattatatgttaaatgaaccacaacatcattctgtttagaagccagagaactaattggctcttgcactgagtattttatttactgttgtatgtatgtttcacatgcatgggaatatgcaaatatgtagagaccagagcagcacatagggcatcttctatagcgctccgcctttctgccttgagacaggcatgaatggtaacctcactgtctgtttgtgagctcttcatatccacctgactctcttcctcaatgctgggattataggcatgcacaattacggccttctttttaagaaagtggtaaagatttgaacttatatcctcatgcctgctaggcaaatgatcttaaccactgtaccatcttgtccatttaatgcatttcatatttcatacagaaaaatagtatattccaatatattgaaatcaggtattggtgcttgttagcacttaaaagacagaattcagtgtgaacatgctgacatggaatgagaagggggaagaaatatattctgacattcctttcataatcatgccaagcataaccctgtttatgcttcctatagccctggaatgagaccagatgtgagttctcctccgtccagctcctccacagcaacgggaccacctcccaaactctgcctggtgtgctccgatgaagcttcgggatgccattatggggtgctgacgtgtggaagctgtaaagtcttctttaaaagagcagtggaaggtagtgtgtgttttgaagagtttaatttttgttcctatttctcacagtaaatgtttaactgttcattgtatacaaagtccactaatgatagacattagttcaggtgcaagcatggtggctcttaaatcctccattgggaagggacagaagtaaggagaagaactagaataagtaattaagttcagcctgagaaagaactaaagcaagcattgtaaggaacgctgctgcacggactggcagtactctgagtctgggcagtccgagaatggtggcttttcattccctgtaagcaagctggcttcaaagctaccagctataccagactgacaaaatcagtgaccctggggaggaacaataagggagggacagcattctttgctttacttttttcctgttaaataaataaagaggtcatgttaagtaccacaatggctgaggccaaattaacaaagtacagagattatcagataggtgaagtctagaaatatggtgtttgaaagaagatgactgcaaggtgatcatgtgttgacgggttcacattccagagcagccggttaatattagagatagtttatataccctacccaaaagtatcttaatggaattaaaccagaaaataaagctacattgatctttcaatatactacaattcacagcccattgttcttatttaaaatgaactcattcccttatttttatgtaaaaataagtattagctatgctatttataaaatgtttaccatttagttatttcagcaaagcgtggtggctagattacattagtaaggaagcctttagctgtgtacggtgttaatgagtaagcctcttggctcagcttcctccctaacttgagtttcagtgttctcaaaggcactttccagctctaacattctgtaaacccttgatactctaattcaaggaaaaaaatttatctagacttgtaaaatccataacatagtttgtagcatttcatttttaaaattattaaattttatttgatattacatacattacatatataacataacattttaacacatactagaaattatacttaaaccctgtattggcattataaatacccaaacataaatcagagttaagttttacacatttgttatttatataagacaaatctattttttaatccaagatcctatgagttctccatgtccttatgcccagctggtcctttttacttgtattcattttacctacaagtatctataactgtattggtagaccataagtggatagttaccaatgactcttcacttgccgtgtgtgaagtacatgcatccaaaatcaattagtggccctgtgaacacttagatcctgttaggatctgtgtctgccagactagcaaacaggttcagaaagttgaagtagccaagctgggattgcaacaaagtggtctccaagtaaggtcttattctcaacaaagatcctcaaagatgcatctgacaagcccttgatacctgctagattataattcaggtagatgctgaaataaaagtaatcacaagagatttaactattagctactatatactgagtagttatggtgtgttgagcacagtatcgtctgcataattacttccaagcttggcaaattttctaacagttcataagagaacaaactccaaaaagttaatgtttccaagatcagtttcttggcatgccactataccactgctactgagaactgctatagaagcgtaagctgatagtattagtttatacttaatctccaggtactcacagtacagtctgtagcctgcatcttttacatgtgttgtttcccatttcctataccatgttgttctatgcaacattttattggtcataggatccagctttggtatgattctagaaaggattacactacaccttattaggagacagatatcactggctatcctgtaagctggctgctacaccaatcataaatagcaaggcactgtcaagtgctaaaactagatttagccaaaagcaccaacaaccaacagcattaaagaggctttggatgagctgaaggctcttcccttgacattaagaagttagaaaggaaatttatcaggtggcagaaaacaaaggaattccagatgactgtcttaaaaagacatgtaattggtagtacatggccattctcattctttgtgaaataatgaacactagctcaaatcccctgttttgttacaaggaatgaatagactagtggatcattctattatactaacctgagcctatagctaagattctcagttatactacacactggataaagaaataaatatcagcataatacacagtcaatcttttagttagacataaataaacactgaattttttctactctagaagtaatttttccccagtttttccagcaacactgatataaggattctctgaaagacaatggatgtaggggtgtttttatggggtaaaattttagtgctttaactgtggatacaatctgttgtttctccttttgctgcatgatggaagtttttaaaaagaatttatttatccttatttatatgtataaatgtttacctgtataaacactgtgtgcctggtacctgcagagctaaagggcatctggttccctagaattggagttatagacagttgtgacctgctgccatgtgggtgctaggaactgaaccaaagtcctttgcaagagcagcaagtgttcttaactactgagccatctctccaatcccatataataggattttattgagttagttcttctattttgtgtttaagaaaacaggaggcttataaaatacagaaagtatttgaaagagctagcatagatattaggcatgggaaagtaaccctgaaataaagccattatataacttaactatatagctaagtgtatatatatatatatatatatatatatatatatatatatacacacacatacatacatatgactattagtcaacttcgtaactgtatcttcacaaaagattagactaatacagttaactatgtactccaaactcatatttaaacaacatcatgattttacatatcaggaaaaactaaatgttttttttttaatccaagtcttagattgccctaataaagaaaaaagtctcttcttagaaatcaggtctatatatgttccaactggtgaactgactgttacaattctttctcatttctttgaatatgatttattctaatataagtaacacagattgttaattactggtgtatctatatagacagttaaatcttgtgtaggaagcttctataccccaccccagtcaaatagatccttcagttgttttcatcaacatttaatactcagattaaagaagacagtgcatgtgggaaacagaaacacttttagccttttcctttttaacagtcttagaattttttgccaggagagaactgaagttcataatatgttcttcagtagtggataccagaaaatggagccactagctagcattaagtcagtatttgaggccaaaggtgactccatgcatctttgtattctaaaagtatattaaataatgatctttgttagtttgtttagtttgccacatttgtgatttacctaaccagtggctagaagttggtaacattttacttcatttaaaattgggaagaacttcttttacctacacatgataatgttgagtgatgaattaaagtcatctttttccttagggattccaaaagaaaatttaagcctgcttccttttagtcacttcaacaatagatcagaattcataataaaagtaataattgcaaaccccatttataactgttaaataactatagaaagcaggttttaaagtttgatcttagagtattcttatgatttgaatacatatatatatgaaatactgtagttgggttgttttcattgattttaaattcgttaagcagaacaagtcctctcaacattgtaattcatgcagataaacagacttaacatccttagtcagtgactttgtgtcttgatgatagtctgctcaaaacaaaaacagaaaggggataggctttttcttttaaaatatccttacagatctgtggaattttaacaatgcccttttaatctcttataggacagcacaattacctttgtgctggaagaaatgattgcatcattgataaaattcgaagaaaaaactgtccagcatgccgctatcgaaaatgtcttcaagctggaatgaacctggaaggtaatggaagcttaaggaactgtctgcctgtcacatgagaactgatcctttactttataaaagctagcaagtgaaccatgtaatgaactctatatatgcttaattagcaaaatgttatattaaaatggttttttccacgatcatatcattttgtgtgttaattcaactacttttgttatatacattgaatttgggacagccatggtgtatattaagtaaagagattacataatattgaaaattacataacttggagcaattttgttttcatccttcttactccttttttaaaactcaaaaccatttcctaagattggaaaagtattgtacatgagatctagttcatattcctctcttactttgcacttcaaaaaccaccacaccttttacttgaaaacatatgttttattacaactctgccaacaacattggatgggttgttttatggtttaagtataaaggaaaagtaaaaactacttgtaagttataatttgatattcctgcttatataaaaagttatataattaacacttatttaaaaacttccctctggaaacgtcagggttttgctgtagtggaaatagcaagctctgtgaaagtagcattcttcctaactcatgttgttagtattgactgttactgtggtacatcatagcaaacgctcagcaaatataaagagaatacaaatttagtacctgagtctgagcagcttactttctgtttatgctacagtgtcaatcacaaaatagtatggcactctacaaaggcaatactattacaggaccaagacggaaggccatctgagcctgtcctgaaagtcagactcatcctggaagaagtagcactgagctgcaaatacagaccttgaggaggaattagatagccatgacagagacgtgctcatagttgtactttataaagagcagtctttgggatagacaaatggatcggtggcaggggatccaacttcacttctcagcacccttatttgctgagaactcacagctgcctctaactgggaattgaactcagcatctctagaagagcggtcagtgctcttaactgctgagccatttctccagcctgagactcaaaagtttaaggtgaacagtaaactcttggttccctgttagaggaaacaagtcctgggagggaattcctatagagaatcctggaattgggagttccatgggtaaaatcacttgctaggcacgcatgaaagacccaagttaggatcccactacccacttaaaaagccaggtctagctatgctcttgcctattaaccacagaattttgaaggataaggtggagacaggagtgtttctagggcttactggcctacctccaagtccaacgagagagcctgcctcaaaagagtgatagacttggatacccaacttcttcccctggccttgagtcatgcacagatgtgtgcatatgcacgtgtacatacaccacactcacacatgtacacacagattcacatagacatgccaaaagttttaaatagtttacttctttcaataatagtgtcagaaattaaagacctcttataacttgaaagtataggctacaaagttgatttcgtatatttttttcttttttcaatattcacagctcgaaaaacgaagaaaaaaattaaaggaattcagcaagccactgcaggagtctcacaagacacttctgaaaacgctaacaaaacaatagttcctgccgcgctgccacagcttacccctaccctggtgtcactgctggaggtgatcgagcctgaggtgttatatgcaggatatgacagctctgttccagactcagcatggagaattatgaccacgctcaacatgttaggtgggcgccaagtgattgccgcagtgaaatgggcaaaggcgataccaggtaaggcatgaaggatgagccacggcataaatctttgtgttttattgaataaatgcactctgagttgggcttggtgaataacttcgtgacatgccatctgcttatcatacacaatccttggggtcagtctgcagcaccctcggaatagagctgctctgagactctaggcggtctgtcctcctgacggagctcacggcagagctggtttcttttactcacaaggacaaaagagagatccaaagtatactggatactgttccctgactttcaggttacacatagtgtctcattttacataagatcttatattatccgaactaaaattccattcacagcgacacctggaagacagcatttagaaattccatttattttcattcagattgtttttgaagttgataaacagcaggttttgttgactttgtcaaaatttactaacacaaagttattttaatttttcattaaatgaaatggcatctactgactataaactttattctagctttaaaggtatttttaaacaagtttcatgttggaacttcgggtgcagcagaggccaaggttaagcatccgcccttactttacagatagcaaagtggttggcacgtttatggctgcatacacctaagctgccatcaccccacctttttagcaaaagaagatggatgtcaggaaattttaaaaatctaaatctgttaagaaataggaatcctaagcaaagactctcggctttctcttttactatatattctactttgtgtgcacttaaatggacaaaattggccaaaaaatagctattcataagtgtttttaaatcattaaagagggttgagtgcccaggcgttgatctggtcaatggctgtctactaaagatcacatccaaacaaggccaacttgtcaactcgagtgttccttatacctttatttcccatctaggattcagaaacttacacctggatgaccaaatgacccttctacagtactcatggatgtttctcatggcatttgccctgggttggagatcatacagacaagcaagtggaaacctgctatgctttgctcctgatctgattattaatgagtaagttacatggccttaaccctccacaaagaactatagcaactaagcagtgctgacaacaggagaaatggttttccccagagactaatacatcagttggttatccagtaccattggtcatccctagaagcatgcatacaagtaacatcatgcatactgagcaggtttcacttatgtatttaggaatatatatatgaatatacatgcatgaatgtaacagcaattcatgcacaaagtggccatcaatttgaaggagagcaaaaagaggaatgtgaaaaggtttagagagaggaaagggaagggaaggggcaaatgactttgtaatctgagaaaaatgaaagaattttaaaataaataagcagactaaaagacctgtaaaaaataactaatcccctaatgtttccataaaagtatgctgtaaagattccagaattagatagcttattgagttctgagtatataaaggattcacaattttgttgtttcaaaacagcaaaaacctagtgtcacatgtaaagggttattattgaatagtctctccatgttctccaacattctagttctataataggttattgggaatagcagtaggtatgtttgcagccatgacttcataaatttaaaaaccaacccaaaattcagctaatattttagactagcactatttctttctaactcacatctgtatttgtgtctcccaggcagagaatgactctaccctgcatgtatgaccaatgtaaacacatgctgtttatctccactgaattacaaagattgcaggtatcctatgaagagtatctctgtatgaaaaccttactgcttctctcctcaggttggtggaccacctactcacttttaactttcattctaaatatggcaaatgcatgtgaaagttgtataactatcgtgcatatatgtgtatatatatgtatgtgtgtgtgtatatatatatatatatacatatatatatatatgccaatttcattgtgttttcctagtaagatgatttttagaaaggcaaactgtaaaaagggtatatatatatattaagtgttatcaatattagtaaaataaataggtattgtagatctaggtgtgggatctgcccagggatctctggtgatgaggctccatatagagtcttccttcctgctacccattcatctatatctatataagatgtggagaaagaatgccaacagtaatgagtctgtctctctactgtacgagtgtttctagataaacagtgacagctaccatgaatggggaatagctgagaaaataatcannnnnnnnnnnnnnnnnnnnaatgtttaaactttagactttagcaagactactttatattaaaagtaaaaaagttcaaaaaattaaaggaatcttgtctatattagttaagtaataaaaggaaagtcatacctgatattctcttaaaatatacaaagatctcttcaagtcagcaattgaaacaacccagtttttaaggactgggaatatgcaaagatgacttattaaataagatagaataaagacagtaagtctgtcacattccataaggacatgtctagaatgagccaatccagagtagtgagtacaccaaatactggttgaggacacagagtacaggaattctttttcactgctgaaagaatagcaaagtggaatgaccatttcagaagacagtttggtagtttcctataaaggcgaacatagtctcaccatctggtgtagcaattgcttgatcagtatacaaaggaaatgaaaacttatgcagcatggatatttatagccaagctgtttgtatctggctcaacttaggcgcaatgagatatatcatccagtagacaaatcaataaactgacatatgcaaatgatggtattactcaacactgaaaagaaatgggctgttgtgccaataaaaaaatattattgaatcttaaatatatactattaaaaaaagtaatttcttaaaaagaatctcatcaactctaagaaacagatggaggcagatgagatgacttgtgtaaaatggaagctcaacatgcccagcaagccaactttcctcagaaattttacaggtgcttgtggtgaagataagaggaaaactctcccatttttatgtcagttagaaagggggataaactgttggaggtacatgtagtatttccaaagcaaaagcaaggcctgccctataagagaacctcatcaagaccttatctgacatggagcaaaggcaaataaaggattctagacccttataatagccctcctgacttcacagggaagaaaaggggaaaatgggtttccaggaagcatttgggtgcagtaaaagtgaaatgtaatcttaagagaaaacatttcattggagccttgcttacagttcccagagcttagcttagttcattatcgtgatggcaggcaagcatgattctggaaaagtagctgagtgctacactctgatcggcaagcagagagagaaagagagtagcactgggcctgttgtggacttttgagacctcaaagcttatcctacagtgtcacacagtaacagggccacacctactcaaataagagcacacctcccaatccttctaatcctttcatagctcccctccctggtaactaagcctatgggaccattcttattcaaaccaccacagtgcagataaccaacattaaacacagtccagagcctagccagattaccatactatcttccaccaaatgtcttaattccatcagttctgatactccttgtctagctttcaataaaaaacaaagccagcattaaatctgccccaaaccactggcattatcacattggaatttaaaataactgcaatatttttgctaaggacactacaggaaaaataaagaccacatgagaattatgaatgaagagtcatagaagctaaggaggttcctctaagggagcactagagataacagatgctgaaatgataatgcacagtgctcctagcaggcagaccatcagttgtcatataaccaagaaagagtgagcatagggcaacaaaaacctcctagactcaaataaaaagagggaaaagaataaaaaaaaggtgtagagagatcataaaaaatattttaagtaataaaagttcaaaaatttctaaaattagttatatgtaccaaaatgtggatgcaggatgctcaaggataaccaagcaaagaaaaacaataacaacaaaaaaatctatattttggcatatcctcttcaaattataaaaaaaaaaagattttttaccctgagttatggttttaaaacagcaatgacaacaaccagacttcttatcagaaatcatgcaagtaagaatgtgaagtaaatagttagaaatgaaagcaaacaacccaccagtcctgagacaatagatccaacagaattacctctcagaagtgaggaagatggtgccatgcacagtagtagacacctagaattctagcactccagagactaaggactgaaattcaagccagccatggctacctatcaagactgtctcaagaaataaagtaatgggtaaaataaaaacattctcaaacaaatgtgtctttttaaagggattttgtggtcatctttacatctgtcctacatgagctattttaaaaattgttcagaagagaggaaaatatgtcagaattatgtgctgcataagaaagagattatagctgggcagtggtggcgcacgcctttaatcccggcacttgggaggcagaggcaggtggatttctgagttcgagaccagcctggtctacagagttccaggacagccagggctacacagagaaaccctgtctcggaaaaagaaagaaagaaaaggaaggaaagaaggaagggagggagggagggagggattttaatagaaaagggatgcctgagagtaaaatgtcaattttcttcttaatgttacataactgttatagtgataataatcaggtatcaggggatctggagaggtggctcagcagttcccagcacccacataaccactcagaactgtctaactcaggtcccagtgatccattgcctacttctaacttctggggtacatacttgtggtgtacaaacatacatcaggcaaaacactcatgcacacagatacacacacacacacacacacacacacacacacttttatttatcttacaaattaacaatcgcagactatgtgattgaaatacaggcatatgtacaatgaatgacagaggtattgtagttaagttaggagggaaatttcagatacactctggcattgactttgcctgttagagtagttctagtgtatttcggaagggagaacaggttagttgtaaatgtgtactgcagatgacagagcagtcactaagagttcaaactgtcaaagggaacacgcaatcatgagcatgtctgggacactgaaggctgatgggagtctccagagtctagtggttgaaagtgtgcaccacaggcagggtccccagcttccccaaacctgatgtgcttggtcagaacagaagcacctctcggggccaagctaagggggaagctccttcccctcctcggggcaaagttggaaaaactgctaagtgtgagcaaaggcaatccccagaaacaaaaaagcaaaatggattcttggtgcaaaactagtagcaagagcacaggtctgcttcagtgagctccttggggctgtttctaaaatgtgttcatgggaggcacatctgctaaggaatgaaaaactgaagacaacaagaaagaggaatggaaaccagcatttcctcctagggagattaagttcagtataatggagaaagaaggaaggagaagaaagcctggaaggagaatgacagacttaattccctggtgacactgcagacgctggggagatgtgcggcagcaatgatacaatctagggaaagcctgctgaacggaaggagaaggacagcgagagttgtgcccacagcgataagggagacaggttcagtaaaaaggacagctgtgaagctttcaaatcagaggaagatgattaataatgaagtggatctccttcagtgtgttcttgtcaatgaagtatttaaacaactcccttcaaagaaaaagactgaaatcaaaggctctatagaagtgcttctaaactctctagccgtttgctttgtaatagttaacacacagcacagacaccctttcctggaggtactgacctcacctggtacagtatgaaggttgtaaaatggaagattgtttaaagcgggttctcactggtacacatcacaaattagctatacacaggatgacacggtttgcatcctcgggtgtcgtcaccgctcccgttataagatgggagacatttggatctcccatggttatgaaccccaattctcagttagcctatactttcacttagctatagtcccaccatcctttgagaatgcatgaattttagagtgtattgaatgtacattgtaacgatgaaatacgcatgaaatgtgctacttagtacaagacaagttaaaaaaaggaaaatttaactgacttcatcttaccttttagttcctaaggaaggtctgaagagccaagagttatttgatgagattcgaatgacttatatcaaagagctaggaaaagccattgtcaaaagggaaggaaactccagtcagaattggcagcggttttatcaactgacaaaacttttggactccatgcatgatgtaagtaccaaacataaatccaaaacaacagcaaaaaagaaaaagtaggttggggtggtggcagatgcctttaatcacagcagacacagaggtagagcaagtagatgtctatgagtctgaggctgctctacatagggaatgccaggacagtcagagatacgtaagagatcctatctcaaaagcccaaagacagagacagagagagacagagacagaagaacattgtaggtcctaggttatggtttaattagtgtatgtgtatagttatataccaatcagtcattatagtgattattcaagataaataattttttacacatttctcttaagtcttactagtctggtcatttgcgtaaagatgactctgttagtacagagttcagtagctcctgattttaagtatccctgaagtacatgaatgagctatcagattacactagtttcacctccctgtgtatcagtactggtgcagtctcctttgagcctgctgcctcgtctcctgactgctgggatcacaggcatgccaggcttcattctgcacacagtttaagatgccttttgttcttatgtgcttattttatttaaattattttcttatctgaggaattccaacaaagattggtatatttgtgatcaaattgttaaaatggccagtagggcaggaatgcaggatctatataccaggtcttctgtgtgtatattacgactttcagtttagtgtgtctgggattctggagtgtgggaaccagtaggtccctgactcttgttcctgttcttgggttctcctttttctctttgtcttttccaacaatatgatggtttttattttattttgctatgttttattttattatcacctcttagaagcacaatctttttaataagaggagaagttgagaggaactgggagggtaagccacaatcaagatacattacatgagaaaagaatttattttcagtaaacaaaaaaatatgtcaagacttggtgtggggagccaagagatatgagccattcgcagttatgctttgaagcctcaccattaccgtatcttctcttgcaggtggttgaaaatctccttagctactgcttccaaacatttttggataagtccatgagtattgaattcccagagatgttagctgaaatcatcactaatcagataccaaaatactcaaatggaaatatcaaaaagcttctgtttcatcagaaatgactgccttactaagaaaggctgccttaaagaaagttgaatttatagcttttactgtacaaacttatcaacttgtcttgtagatgttttgtcgttctttttgtttgtcttgtttgttttctatacgcactacatgtggtctctagagggccaagacttggcaacagaagcagatgagccatcacttttcagtgacaggaaagcagacagtgatgtgcattggctggtgtatcacagaaactagaacagttagtggagacatgtccactatcagagaaggaccgcacctgaaccaccagtgcccaaagtccatgtgatcaactttctgctcaactttcagttggctggataacactttctagacttttctgttggtgtatttttcccatgtatagttaggatagcattttgatttatgcatggaaacctgaaaaaagtttacacgtgtatatcagaaaagggaagttgtgccttttatagctattactgtctggttttaacaatttcctttatattcagtgaactatgcttgctcgtttttcttaaataatttttgtattccagttattgtatagctgtttaagatgggcagctgcctcacagctctcctagacgctaacattaatttccgtgtgaaaatgggtcggtgctcctaccctgatggcactcagctatcagaagaccacagaaattgactcagatctccagtattcttgtcaaaagctcttactctgtatatatctgcttccatggggaattatataggttgtgcagattaaccgtcctaactggtatagagcacctagtccagtgacctgctgggtaaactgtggatgatggttacaaaagactaattgtaaaacagtgcccaccaacaggccccgtttgcacccaatgcaccatctcttcagtggtgcgatagcaacaaagtttgtaactcagctctttcaggaccttcgggagtagtttgtgtaacattttaaaatgtattattccagataaccagctgtgataaagccgagagattgttttaatcagaccaagtaacttctctcattaaacgttaccctcaactaagtctctaatatggcaagaatggctagacacccattttcacatcccacctgtcaccaattggtctagctttcctggtggtacaggaaaatcagctactgattttttgttatttagaactgaatgtcaggcatccatgtttgtccaactatacatccctacatgtgccatagaatctaacacaagtcttgtgaacttcttcacactgagagttatcattttaaacaaaacagaagctgtagtagccctttctgtgtgcaccttaccaactttctgtgactcaaagcttaacacacttactaagccacaagaaatctgatttctacttaaggtggccaaattatttgtgtaatagaaaactgaaaatctaatattaaaaatatgaaacttctaatatatttttatatttagttctagtttcagatatatatcatattggtattcactaatctgggaagggaagggctactgcagctgtacatgcaatttattaacatgattgtaaaatagctgtatagtgtaaaataagaatgatttttagatgagattgttttatcatgacatgttatatattttttgtaggggtcaaagaaatgttgatggatatcctataagatttatagtatataagagcatccatacaggcctcagtggtcttggaaattaaaacaggtttgctctaagctagggagagggagctgggactggccctgtgtgcagtgcaggtcctgagggtttgacccgatcagatcacaggggaactaattccctcccatctaaccatcctcatccgaccatggccctgtcagtgcaggctggctttattaaatccaggacagaaaggtggcgcttatgtacttagaggcaccgtccagtaacagggttgttcccacatgcagcctccgcacgggttaacagaaacagaggctttagaagtttggcaataatgtgcatagaggttccagcaatatgtaaatactaaagaatcgcataggaagccaataatacactaatcctctccatcctacaagagtccatttccaagtaagatgaggacatgtttatgttttctttgaatgctttttgaatgttgttattttcagtattttgcagaaattatttaataaaaaaaagtataatcatttgctttttgaattctctctaaaagggaatgttcagtttgtaatggtttaaattggtctcaaagtactttaaaataattgtaacccagctggatgtgaaatttatggtgcctaagaaataccacttgaagattatcaatgacagtgttaagtttcaaaatgagcttctcaaaaatagattattgtacatttatggaatgttatatggttaaacccaaaaagcacatcacacataaatctgctttcagttccaaccagcttggctttcaaaaatagagctccaaaaaaaaaaaaaggaaaaaaaagatatatatgctttgttattaacagaaggcagcagacattcataaaactactatcggaagttttccattagatgtataaagagctatcctttggtatgtgggaaagaagaaagctgtcataattctgattgagtataagtgagagagatacggtactgtttgagagcagctccttttctgcgtgtggcttcataccgttccaaactatgtagattttataatagcttcagtgagaattggtaacatgcctgtatgactcacaacagatcttgaaaactatctttaattactggtaggacaaaaagggacattctggttattttaggcactggcttggaacactgtatatgcagaagaaagaagacaggcaatctggggaaaggaaggggacctgggaagcactgccttctttaaggaaagacacaccaatagatgagatcatcccaaaggcacagggaccacagagtgtgagtccttagtgacgagtcaggtgagctctggtgagcttggagaagccagccccaccagcagagcaggcacggcagggatgggacaagcagggacgacaattccagctggacactggtcccagtattttgctccctcttatataccgtgaggcagtatcaccgtgggatgaaccatggtagcacgttttgatctgtcagcactcaaggatcatggtagccttcgggagctttaggttttggttggtcaccccaacgatcagctgtagttgaatgtgtttcttatgtgcctggtttcagtgttagaaggtgaaatagagtgtgcaaaggacactgcaaaccacttcggatggaagttttctcattttccagactattttcggtcagcctggtctatcaagatcggtaaccaggtcttcaggaaagggttggcttctatctaggacatgcctgaaaggattttattttctgataaatggctgtatgaaaataccctcctaaataccctgcttaactacatatagatttcagtgtgtcaatattctattttgtatattaaacaaatgctatataatggggacaaatctatattatactgtgtatggcattattaagaagctttttcattattttttatcacagtaatttttaaatgtgtaaaaattaaaaaccagtgactcctgtttaaaaataaaagttgtagttttttattcatgctgaataacctgtagtttaaaaacctgtctttctactacacagtgagatgtcagactgtaaagttttgtgtggaaatgtttaacttttatttttcatttcaatttgctgttctggtattaccaaaccacacatttgtaatgaattggcagtaaatgttagtcagccatttacagcaatgccaaatatggataaacatcataataaaagtatctgctttttcattatgtgactcccaacatgttttcatagaacttgtgcagttacaaccattcttgggttttgttttgtttttttttctcttcattccactcacagcaaagttgccacttgaaggaacgtaagatgctgaggtgggcatgtcagtgccggtttggccgctagtgtgtgcggagagatgacacttattcaaaagcgtaccctgatgccgacagctctaaaggtcttctcacctatctgcagaggtcacatggttatgactccccaggggaatctggggaacacacagaagcacaggagaaactgatgcctgtaactgcttcaaagatgccattcttggtaaacaaatgttatctcatagcacaattaatctcttagtttaaaatccaccgtgctcttagaaatacacataagtaaacacagcaaatgtctaacacagaagataaaggcgtggtggagtcaccatttatctttacactttactcggtagcttctaaaacattatgttttctatatctcccacagtatagcactatcgcttatgaaaaaagccattctaatttaaagagtaaaattgccttatctcatacactccatctactggctgcatgcctactatataaatataaggaaatgacaacacttagatacttaagaccatgagattgggatgtccggaaccacctttctcagtgtcttaaagtacaacagatgcaccagatacggctcagtggtctacagtttgcatttgcatatgcatctacagagcccagaagagaatagtgtcttcctcttattgctctctgccatattctcttgagacaaggtctctcagtagttcagctagaccaactagctagtgagcgcccaggatcttcccgtctgccctgcagtgctgggcttacaggcagctgtagccatgtccagtttgtggactctgggtattcaaattcagatgcccacgcttgccgagcaagagttcttactgagccacacagttcacccgtacctattcttgttgtactatttactctcaagtataaacctggttttgtaaagttcctttgcacacgctatactagttagtcttcactcaatgaataaagtgaagacattgatgctagtaactcaattagtaaaactgcactggaaacctgtgtgaggaagccatttggttaccaagtctcagatagcaagtctcaggcagcgtctcagacaacatattttctgcttttctctactgcttcactgagcacttactatgtctcagacaccatgtttttttttaacatattatttaatctttgcagccctttaaagcaatattcttattctcatacatatgaggacagaatagtttgaaaaaaaaatgggtagtcttccaagacttaacaaagcttgggaatggctaagtaaaacgtgacgacagtgggcatctggctcaggggttcgcgttcttaagcacttccggggagagagggatgtgaagcttctaaatgcagcagctgagccttgtgtccctgtcctccgacatgagctcaatcccatttgctactgcatccattttttaaattctttattttgagattgtagttgtgtcattctcccttccctctcctccctcaagcccttctttcttttcttcaaactcatggcctttttctcattagcattgttgtgtgtgtgtgtgtgtgtgtgtgttggagcagatgccatctttcttagatatataagcataacctactcaatcatacgaatgacctgtatgtatgtttggacccctagaggatgagggtgaaaaactaactccagagagattacagaaaactctttggtttttcaaatatacaaggaatctgcgtgtcacttaacagcgctcacagcaaatcaactaacctccaggcagaagaagataaagagcttacagttacactgaggaggaggaaagatgttagcaagtgaaagctctgattcaagccaaatctgaccccactgtaacaacaacaacttctagctaaaccttggatataaaaaacaaaatcaaaaacacttgaaaggctgaaaatgcagcactagctgaatagtttgtagactttgttcatcttgagagtggctcccaacagcttttatagaatcttctattaagactcttgtaaattaattcatttgttttttaaaagtctcttgcctgcaggctgcatcaagctccctgtttcttggttaaaatgagatagtgcagggctaaagggaacactttactctgttcgtttctagaactgaagaaactgagcagttcatctagaccctagcagatgcctagaggccccggccaccggaataagggggattcgcagtctgttcatcccatgtgccctcctcagtgagctctaggcaatgaggcagtcccggcagctttgaaatggcagtgtcagaaatggaaccatgcacaactaactacaaagggaatcaaagattcaagttttaaggcaatatgtctccttcccttcgtttattgggaaatggttctctttctcactttctttgattcctccttagctttctgtgtgttcataacaaatatacacactccataagtgacaggaacagtgacagaagatgaaagcacacagccactagtgctaccactatgtcctgctgtctggcatttatcaccctagatatgattcttatattacatcatgtttggggagaggtggctgggcacatgccaccgtgcacttgtggaggtctggaggacagtttgtgggagttgattctctgcttccaccatgtaggtcccagagatcaaactcaggttgtccagcttggcagcaagtcaatttacctgttgagccatcatactggccctcatttttgcttttaatttgtttctgttgctcagtctgtcccagacacctgcacctagatgtaagtacaaaagacctacagctcggggcttgaacagtgtccgggcatacacattcacagcagcgttgctaacaagagccagggtccataaggctttgcttagtaagtactctcaagataccatggggttctgatggaaatatgaatgtaggacatgtaaaatctccaaggctgataagattccaaggaataaagaaagttagtgtgaagggggaggacagtattcataaaagcagaggctcacatgaaatcatatcacaaggagctcctgattaatttagtggcctcccactcaaaggccaccaaggcattactaaaaatccatgaatacagtcctgccctcaaggaattcaatatgaaggcctaatgacttagcatgtccacatctgtttgtctattccaataagaacacttgaccattcaatgacctacatgtgaatgtgcatagtagcaaaacagccaaaatgtgaaagcaatgtaatgactttccattggtgaacaggaaaacatacaatataattattatctatggccactaaaagtaaaatacagatgcatcccataactatacgtcatgctatagaacatgctaaaagaaggcaggcacatacatgatttttcttagatgcccagaaaaggcaaatccatacagccagacagctcatcaatggttgcctatggctagagatagcatcaggacccaatgtactgagttagtgaaacttctaggtggtggagtgttctgaaacttattacagtgatgactgcatagcttggtgaagtcaatagaatcccagaactctacttcatcagaaattacacaaaactgtgggctaatatcccttatgaacacagatggcaaaaagtctaaacaaagccttggcaacgcactctagtattaaaggaagagtgcaccgtaaccaataggttaacccacaaatgcagtgctgtgttaacactaaagtctagcgggactggcgagatggctcaggagataaaggtgcttgacactaaccttggccatctgagctccaggcctgggacatacagaggaggagagagtcaattccagcaagctcttctctgacctccacacatgctaacaatggtgtacacacaatggtgtacacatatgcacacacataaaggaaataaatgtggaaaaaagtaattcacagtggtataaaattaaaagagaaaacaatgtggtgaaatacgtatcaaacatttcctgaaatgccacatatcccgatttcttttaaagacactcagtgattataaagccctcaaccttctgaaaggcgcctaccataaggtatctgtcagcatcatgctcaatggaaaaagaaaacctttcctcttaagagcagtaacaaaatgtttacatctacttttactacttccatccaaatatcatatgagggctgcagactctataataagaaaaagaaatacgacatttaatcacaaaggaaaaaacaaagttatttgtaggtataatcatgatatcttaaatggttctattaaatttcaaacggttgaagagatttgccatctagcctactattctattcttaggtagatatccaaaaaaatcgaaagcatctgcccaagtaagcatggtttttcaccctcagtttccccaggagtccaaggatcctgcttagagtgcagggttttacactggagtgacgggagtggcttgaaatcagacaggaatggctggtaggtaacactgggttacggcacattgtctggttttgagcagtttcattatgactttcagctcaatgaacattatttttttaagttactaggagtaatggcagttgagggctgcaagatacagtgggccaacaaacctataaatacaaaagcaaggcattccaacagaccatttgttctgcaaattaaaattaccatctgactgactcttagaacatcagatcaatataaaaagtaattttacatctatgctatgatattcaaggtggtacagtactggcaataactaagtaaaattattttttaactgacaagttaatcctttaaacagaatagagagttcagaattgaaccgacataaatgcagtcaagcgatgtttgacaaaggagcaaaagctaacacagcaaagagaaaccatccacaaatgatgctaggaagagtgggcgtcacctgcaaaaggtatctctagatgcagactttccattctgaacaaatataaattaaattaagtgggaaacagaagttacaagtttctaaaagacatagaacagtccacatgatatgctaccaaaggcattattcatgaaagaaagaataagctggacttgattaacatttcaaatttctcctatgcaagagacaatatgaaaagacaagccacatactgagggaaaatacctgggcgagacctttcctcatgagcacacaaaggctcctgagacccagaagtacgctagataaacagtgtaaaagctgaccaaggagcctgccctgagaagatagaaaggtgaagggcacatgaaaactgttcccgtcacagattatctgggaaattaaaagttgaagcaaaatgagataacactccatatttttagaatggctcaaatgcacaacaactatacctccaaatgctggggagggcgggacaacatgaactcttgtttgttgctaatcgaaattatgtgtggcgtgatggaagatgcagttcttagaaaaatccagcatactcttaccattttagcaatgaatggctctgtatttagactttaagacatatacacacaaaaacatctattagagcaactttgttcataatcaccaacatgtgggagcattgatatggcttgagtaaaaaccaaacatcaaactgtggaatatgattcaacactaaaaaccaggctaaaggccctgaaaaggcatagaggagccttaactatacattacaaaggaggggagctgatctgaaagatgtgcattctgtatgatccccagtgcagggcagtctgtaaagggcaaaactatacagaaagatgtttagtgcttttagaagcagaagttggaagtagagaggaatgcaaagaacagaggatagacagggcagcaaaagttttccacatctcacggtggacatgctctaactatccaaatatacagcaccaacatagatcctaacatagcctataaactaagagcaatggtggtgtcaacatgggggtcctctactgtaatacgtgaatttgtaaaaggatggatattgattctaggagtgctattcacgagggggctaagggagaatagagaagagctctgtgaacagttcctacagtaactttctcacagttttatatcaatc

SEQ ID NO: 218 - DNA, 2575 bp, Mus musculus
ggaagttaatatttgccaatggactccaaagaatccttagctccccctggtagagacgaagtccccagcagtttgcttggccgggggaggggaagcgtgatggacttgtataaaaccctgaggggtggagctacagtcaaggtttctgcgtcttcaccctcagtggctgctgcttctcaggcagattccaagcagcagaggattctccttgatttttcaaaaggctcagcaagcaatgcacagcagcagcagcagcagcagcagccgcagccagatttatccaaagccgtttcactgtccatgggactgtatatgggagagaccgaaacaaaagtgatggggaatgacttgggctacccacagcagggccagcttggcctctcctctggggaaacagactttcggcttctggaagaaagcattgcaaacctcaataggtcgaccagccgtccagagaatcccaagagttcaacacctgcagctgggtgtgctaccccgacagagaaggagtttccccagactcactctgatccatcttcagaacagcaaaatagaaaaagccagcctggcaccaacggtggcagtgtgaaattgtataccacagaccaaagcacctttgacatcttgcaggatttggagttttctgccgggtccccaggtaaagagacaaacgagagtccttggaggtcagacctgttgatagatgaaaacttgctttctcctttggcgggagaagatgatccattccttctggaaggggacgtgaatgaggattgcaagcctcttattttaccggacactaaacctaaaattcaggatactggagatacaatcttatcaagccccagcagtgtggcactgccccaagtgaaaacagagaaagatgatttcattgagctttgcacccctggggtaattaagcaagagaaactgggcccggtttattgccaggcaagcttttctgggacaaatataattgggaataaaatgtctgccatttctgttcatggcgtgagtacctctggaggacagatgtaccactatgacatgaatacagcatccctttctcagcagcaggatcagaagcctgtttttaatgtcattccaccaattcctgttggttctgaaaactggaataggtgccaagggtctggagaggacaacctgacttccttgggggctatgaacttcgcaggccgctcagtgttttctaatggatattcaagccctggaatgagaccagatgtgagttctcctccgtccagctcctccacagcaacgggaccacctcccaaactctgcctggtgtgctccgatgaagcttcggtatgccattatggggtgctgacgtgtggaagctgtaaagtcttctttaaaagagcagtggaaggacagcacaattacctttgtgctggaagaaatgattgcatcattgataaaattcgaagaaaaaactgtccagcatgccgctatcgaaaatgtcttcaagctggaatgaacctggaagctcgaaaaacgaagaaaaaaattaaaggaattcagcaagccactgcaggagtctcacaagacacttctgaaaacgctaacaaaacaatagttcctgccgcgctgccacagcttacccctaccctggtgtcactgctggaggtgatcgagcctgaggtgttatatgcaggatatgacagctctgttccagactcagcatggagaattatgaccacgctcaacatgttaggtgggcgccaagtgattgccgcagtgaaatgggcaaaggcgataccaggattcagaaacttacacctggatgaccaaatgacccttctacagtactcatggatgtttctcatggcatttgccctgggttggagatcatacagacaagcaagtggaaacctgctatgctttgctcctgatctgattattaatgagcagagaatgactctaccctgcatgtatgaccaatgtaaacacatgctgtttatctccactgaattacaaagattgcaggtatcctatgaagagtatctctgtatgaaaaccttactgcttctctcctcagttcctaaggaaggtctgaagagccaagagttatttgatgagattcgaatgacttatatcaaagagctaggaaaagccattgtcaaaagggaaggaaactccagtcagaattggcagcggttttatcaactgacaaaacttttggactccatgcatgatgtggttgaaaatctccttagctactgcttccaaacatttttggataagtccatgagtattgaattcccagagatgttagctgaaatcatcactaatcagataccaaaatactcaaatggaaatatcaaaaagcttctgtttcatcagaaatgactgccttactaagaaaggctgccttaaagaaagttgaatttatagcttttactgtacaaacttatcaacttgtcttgtagatgttttgtcgttctttttgtttgtcttgtttgttttctatacgcactacatgtggtctctagagggccaagacttggcaacagaagcagatgagccatcacttttcagtgacaggaaagcagac

SEQ ID NO: 219 - DNA, 2352 bp, Mus musculus
atggactccaaagaatccttagctccccctggtagagacgaagtccccagcagtttgcttggccgggggaggggaagcgtgatggacttgtataaaaccctgaggggtggagctacagtcaaggtttctgcgtcttcaccctcagtggctgctgcttctcaggcagattccaagcagcagaggattctccttgatttttcaaaaggctcagcaagcaatgcacagcagcagcagcagcagcagcagccgcagccagatttatccaaagccgtttcactgtccatgggactgtatatgggagagaccgaaacaaaagtgatggggaatgacttgggctacccacagcagggccagcttggcctctcctctggggaaacagactttcggcttctggaagaaagcattgcaaacctcaataggtcgaccagccgtccagagaatcccaagagttcaacacctgcagctgggtgtgctaccccgacagagaaggagtttccccagactcactctgatccatcttcagaacagcaaaatagaaaaagccagcctggcaccaacggtggcagtgtgaaattgtataccacagaccaaagcacctttgacatcttgcaggatttggagttttctgccgggtccccaggtaaagagacaaacgagagtccttggaggtcagacctgttgatagatgaaaacttgctttctcctttggcgggagaagatgatccattccttctggaaggggacgtgaatgaggattgcaagcctcttattttaccggacactaaacctaaaattcaggatactggagatacaatcttatcaagccccagcagtgtggcactgccccaagtgaaaacagagaaagatgatttcattgagctttgcacccctggggtaattaagcaagagaaactgggcccggtttattgccaggcaagcttttctgggacaaatataattgggaataaaatgtctgccatttctgttcatggcgtgagtacctctggaggacagatgtaccactatgacatgaatacagcatccctttctcagcagcaggatcagaagcctgtttttaatgtcattccaccaattcctgttggttctgaaaactggaataggtgccaagggtctggagaggacaacctgacttccttgggggctatgaacttcgcaggccgctcagtgttttctaatggatattcaagccctggaatgagaccagatgtgagttctcctccgtccagctcctccacagcaacgggaccacctcccaaactctgcctggtgtgctccgatgaagcttcggtatgccattatggggtgctgacgtgtggaagctgtaaagtcttctttaaaagagcagtggaaggacagcacaattacctttgtgctggaagaaatgattgcatcattgataaaattcgaagaaaaaactgtccagcatgccgctatcgaaaatgtcttcaagctggaatgaacctggaagctcgaaaaacgaagaaaaaaattaaaggaattcagcaagccactgcaggagtctcacaagacacttctgaaaacgctaacaaaacaatagttcctgccgcgctgccacagcttacccctaccctggtgtcactgctggaggtgatcgagcctgaggtgttatatgcaggatatgacagctctgttccagactcagcatggagaattatgaccacgctcaacatgttaggtgggcgccaagtgattgccgcagtgaaatgggcaaaggcgataccaggattcagaaacttacacctggatgaccaaatgacccttctacagtactcatggatgtttctcatggcatttgccctgggttggagatcatacagacaagcaagtggaaacctgctatgctttgctcctgatctgattattaatgagcagagaatgactctaccctgcatgtatgaccaatgtaaacacatgctgtttatctccactgaattacaaagattgcaggtatcctatgaagagtatctctgtatgaaaaccttactgcttctctcctcagttcctaaggaaggtctgaagagccaagagttatttgatgagattcgaatgacttatatcaaagagctaggaaaagccattgtcaaaagggaaggaaactccagtcagaattggcagcggttttatcaactgacaaaacttttggactccatgcatgatgtggttgaaaatctccttagctactgcttccaaacatttttggataagtccatgagtattgaattcccagagatgttagctgaaatcatcactaatcagataccaaaatactcaaatggaaatatcaaaaagcttctgtttcatcagaaatga

SEQ ID NO: 220 - DNA, 96589 bp, Homo sapiens
  misc_feature (6890)..(7626): "n" at positions 6890 through 7626 can be any base.
ctcccctgcctaaaattccagactgcccattgcactgattccctgggaaataagtgaaaagagacaatgataattttcatttttgttgtggtgaagtgatagtgcaaaaattccataagctcctctaagttttccaaataaagcttagtgtttaaaaacgtttgaacacatgatcccatgtaaggcctacattacttcctgtgtgataggtggggtagatatcattatccttcctttacagattgaaaaacaaggctgagaaaaatcaaatgcctaccccaggctcattcaagtaagtaaatggcagaatagggtctaaaaaccaggtcttgtattgaaaattcaacaagaggatagagaaaatttaattgacaaatactgatctcaaaacaatttttttttcaatggtgacaaatgtcctttgtagcactttggagtttgatatgaagtatcttcttatcttgttaagggatccctataccaagaatgttttcatctcaaccccactatttctaagttagcttaaaaacaaaacaaaaccctgtgtgctctaataagaagatataagaaccaaaatggaaatgcaggttctcaaatgagctgaaagattccacatagcagcggggcagattgaaacactctttaccaaaggaacatgggagagaaaaggagattaaatcaagaaaggaagaaagctaatgacatatgaggagccacaaatgccacaaatgaaaaaacaaagtacgtaatacttgttgcaattattcagtgtgcttgctctaatgcctccaaacattaaaaacattgagttcctgcttatggcaacatttatctcatttatctgctgatagctgcctcatccttgaatcaggtattgcttaaactaagttctgccagcataaagaataaagtcaaccaggacacccattgggcatttcacgcatatgagcacaaattgtgatattttaggttgcttatgatgaaatcattgaaagcatcatgaaagacagcaaaacagcaggaaagctagtaataatttagcatttcccagtccaggcgggaatgttaattctaattacaacgaggaataccaaagtggagttcattatgattaagaacttgctgtactagtgtgaattgtttataataggcatgtctggcataaaatacaaatattgaagcagacagagatggctcattcaaagctcagctgggttcccttgaacctcttaccttataaagttaaataggaatagaagtattttccaaagtcaagatattattttaaagagacaaataatagctatgatagctgcaggaataattttttaaagtaagttctaaccaccaataaaagctgtttgtgtgggcttaacatgttcaaaatacacaatacacatgtacacaatacacgtatacatggttcccatttatatttaacatcacacatttaaagtgagagagtacagaaaaaaagaataaatggaaactgaagccatgacaaagaatcacggactataggaaaataagtcacaaagaagtatgcttatgtaagaggaaatatatgtgataaacaacaggagacatgggaatgaatgtggtgtcttatgtcctttctttaacagaatcgtgtaacagacactactcaatatcgatctcaactgatccagttctccagtctccctggaaaacaatggattgatgcccagggtgcgctgaacactggaaccatggtcacttctgcacttcacacgattctgctcccaccagttgagctaccaacagttcctggtgcttttgcttcccaaacatgtttatgccatttgttgcttattactgtacttacttaatttgattaaatattaagtaaaatgatgaaatgagtgtaaaaaattgttctataaaatctaaatggaaagatgccctatagccttccttgacttacagttgcgtcaagtaaggtggatgtaagacaattttaaaagactggtgtgggggcaggagtgaggaatcataaaaatttagaaatctgcacgaaaattattctaaaagtacacattgaacatccctaacttgaaaatctgaattttgaagtgctccaaaatccaaaactttttgagcattgttatgataccacaaatgaaaaatcctacatggaagtacttaccacaaactttgcttcatgccccaaattattttaaatattgtataaaattatcttcaggctataaggtgtatatgaaacaaaaaatgaatttcctatttagacttgggtcccatggccgagatatctcattataatgcaaatattccaaaatcagaaaaaaaaaaatccaaaatctaaaacactttcagtattaagcatttcaggtcatggatactgaatgtgtatctttaatttcttgttctactttgtttaaaaaaaagggggaaaatagtaattctacagatgaataataattgctaatgatgagcaaatacttcctatgacccaggaattcgtctaagcacttcacatatatcaaactggtttaatctttataaatcagtactattattatccccattttacagatgatggaaaaaggcacagagagttagcctgcccaaggttacattccttttagtggtggagactgtatttggcctttatagtctggcttttaactgctacactatatcaatgcattacaggtatagtttatacacacactaaagaagacatggaactccagtcagtgggctcataaaagctttagaccttcatcaaaagattagaaaataaatgttcaatcacaggttttaggtttcaaaagtttcaaaagtttaaagtttgcaagttatctttcttaaaattatttccttcttttaactaatttttaaattaaactccagttcaatcacatccactagaaggcttcactttctacaaaggggtaggtaaaggtgatgatcttaaataccatactgggagttgggatctgtgtagcactagaatcaagagttattgtatatacttgagaaggagcacagcctgatttagttgatgttttggaggggtaatctggcagtacagcttggattattttagtgggaatggagatgacaaaacatgaagagaatgggagaactcacttgggtaatatatcagtttctgaaatcaatgtatcaagtggtttggttattagtcaggcttaaggttttattggccttaggacatagtctctaagaccatatattatcttcattcattcatttaaccaacacccactgagcaccaactatgcactagtgatacaggggtgaacaaacagacacagtccctgcctttgcagaacttatgttctggtgggtgatacagagaaataacaaatgagggcacaaataatgaactatcattgtaatgtgctaacaaagtatgcagaatactataagaacatacaatcaagaatctaatctagtttattttaaaaaaaagtggggggagcactcagatgtttaaacacaaaacaataaaaatgaggatcttgagggttatctgtacactttttattaacccatttggccacaacaataacccagtaaaagtgattttacatctagttaactagttgactcaatgttattataaccctgtaatgtatttgttgggtgcctgctatgtagtgggctgtgttccaggagtgggacataaagctatgacaagatagatcaggtccttgccttgactgagtctgaatacatcaccttcatttccacctctgcttctaagacaatcaaataccttcccactcagatagggattcatcctatttcttgtagtaattataagttcccagggttacagattagtaaatgccatacctaaagacttaggatactgtgcataaaacactttcaatagtgtctgtcagacagcagatgcgcaataaatgttgactttcgttagaattgtgttattattataatgctaaatctcacgtcctttctggcacactggagttcatctcttcaattaaattccgtaagcacatattgtaagtagtctatcagaattgatatactacttcatgttaatgattgagatcagtgaggaaaaccactttaatattgtctaattcctctcttaatgcataggagccatgtgaacttagacaagcatcaacctctgtaagcctgttgtcctcatattgaaaaatcgaataacaatacctatctcatttaattgttgtcagcaaaagtgggcagcagaagagtggggatcaataaatgttagccacaaatcataactatttgtattactctgaaaaagaggggttaacttatagttcatgcatgcttccaaatgaatgtgaaagactaaagaatgagaatttttttgctatcaaattaaaaaattaacaggcacatttagattgctgaagagagaaattaggataagtttttttttttttttgctcaattaaaaacgttttcaatggcatatttaaaactacgtattcttccccattaagatctgcagagaaaaaaaaatgaagggagaataattgggaactcttgtgaaatcataaattatttaagcagagtacctaccactaaggatttgagcatgtatgagcgatgaggtggattcttagagcagagattcagcagtgagacaggctaatggcatggggagatgtgttctattagacaactgtattgtccccttaattatatacatatatatgtatataatatatatgtgtatacatatgtatacatacatgtatatataaatagaattcttaatcattttaagcagtgtacaaggataattattagcatgggctatttaactcacttttaaaacgtgtaaaacattattgtagggttgggtcttgatttgtttcccatgaaactgttggtagtttaggggccaaattaacgaaagacatctcattctagtgcttgaggctcagaaattggaaaaacgggcaactaggtcaagcagtgttctcatagcctcacagatgagcatccaaagcaagggcctccttctagttgacttgtgccaagggacaggagaagcggagtctgccttctgggtccagaagggggttttgttaacatggagttgctcagcgcccttcataaaaattcttctggctgagggttctacgttggcatacggttggttccctcttcttttccgaggtggcgagtatctcttcctttgccaagatggcggctccagaatcctctggaggcggcccccgtagatcgtctccggacaagaggcttgctgaaagcctacttctttcctttcacatcagacaatgcacagggaaccgtttacccttgagaaccaaggaaggacggcttaggctacccgcgatcgcgaacctttgccaagatggtggccgcggggacgggctggcgacactgtaccctaccaagatggcggcgggcggcttccgggacgcgcttccccaatcgtcttcaagatgtcagagcagggggagccgccgtcagtctgagcgcggcgggaggtgagagagtggctgtggccgagcgcccgagcaggattaggtggagctgcggcagcccccgcccgtgtcaggagctggcaagcgatgtcacctgtgggggcgcaaaagttacctccccaaaccctaaacccacacagcacaacctttcccagagtcacaaaaatcataatctgtgccgcacaaggtaggaggctcggtcccggcatcgtccaagccttcccgacgcggcgagctggggaagggagctggggcgggggcttcccgcacgggcacccctcgccccacggccctctcctttctcaggacggaccacgagttcccttccccttggactgagggggaagctcctaacaggaacatctgtagggagttgaacgctggcattttaaagctgcctgtattttgttttatttgtaggggcaggggtcctatgaacgtgatagggtgagcaacgcacagagtcgagggcagcaaatgtcaagattcgggggtggggcctgcaccgggaacttggacgcgggccctggccggggtggaagaagaggtcaggagtttcggaaggggggctatatttcgccagcaacttactatttcgcctgcaacttgcttttaagcctgccgccccctgctttccttaatcataataataaaaaaaaagtgcaaagaaatccagctcgctggaggttttgcatttggcgtgcaacttccttcgagtgtgagcacattgggcgggaggggtgggggttgaacttggcaggcggcgcctccttctgccgccgccgccgcctcgcagactcggggaagagggtgggggacggtcggggcgcgggggagggtgggttctgctttgcaacttctctcccagtgcgagagcgcggcggcggcagctgaagacccggccgcccagatgatgcggtggtgggggacctgccggcacgcgactccccccgggcccaaagtacgtatgcgccgacccccgctatcccgtcccttccctgaagcctccccagagggcgtgtcaggccgcccggccccgagcgcggccgagacgctgcggcaccgtttccgtgcaaccccgtagcccctttcgaagtgacacacttcacgcaactcggcccggcggcggcggcgcgggccactcacgcagctcagccgcgggaggcgccccggctcttgtggcccgcccgctgtcacccgcaggggcactggcggcgcttgccgccaaggggcagagcgagctcccgagtgggtctggagccgcggagctgggcgggggcgggaaggaggtagcgagaaaagaaactggagaaactcggtggcctattaacgccgccccagagagaccaggtcggcccccgnnnnnnnnnnnnnnnnnnnnnnnnnnnnnnnnnnnnnnnnnnnnnnnnnnnnnnnnnnnnnnnnnnnnnnnnnnnnnnnnnnnnnnnnnnnnnnnnnnnnnnnnnnnnnnnnnnnnnnnnnnnnnnnnnnnnnnnnnnnnnnnnnnnnnnnnnnnnnnnnnnnnnnnnnnnnnnnnnnnnnnnnnnnnnnnnnnnnnnnnnnnnnnnnnnnnnnnnnnnnnnnnnnnnnnnnnnnnnnnnnnnnnnnnnnnnnnnnnnnnnnnnnnnnnnnnnnnnnnnnnnnnnnnnnnnnnnnnnnnnnnnnnnnnnnnnnnnnnnnnnnnnnnnnnnnnnnnnnnnnnnnnnnnnnnnnnnnnnnnnnnnnnnnnnnnnnnnnnnnnnnnnnnnnnnnnnnnnnnnnnnnnnnnnnnnnnnnnnnnnnnnnnnnnnnnnnnnnnnnnnnnnnnnnnnnnnnnnnnnnnnnnnnnnnnnnnnnnnnnnnnnnnnnnnnnnnnnnnnnnnnnnnnnnnnnnnnnnnnnnnnnnnnnnnnnnnnnnnnnnnnnnnnnnnnnnnnnnnnnnnnnnnnnnnnnnnnnnnnnnnnnnnnnnnnnnnnnnnnnnnnnnnnnnnnnnnnnnnnnnnnnnnnnnnnnnnnnnnnnnnnnnnnnnnnnnnnnnnnnnnnnnnnnnnnnnnnnnnnnnnnnnnnnnnnnnnnnnnnnnnnnnnnnnnnnnnnnnnnnnnnnnnnnnnnnnnnnnnaggtaagaagcgaggcgggagggggccggggcgcgctcgctcccccgaggtgccgctgggaccggagacaactcgggggccgccgcgggagcctacaaacttttattagcctcggggagtgggggtggggggctggcaagggccgggcgacggtgacgaaagggcagcgcgcgggtgacagcgctggcctcttcctctccctccgccggcgtcccctggccgggccgagggggaggaacctgacctcggacggcgagcggagccccgccgaactgccgggggcttcgagcctctcattcctcgcgggaatcctggcctcttttctccccctagtgtcccctttccctccaagggggtcgcccgacacccgttttcgtggtgaacgctaagccgcgtatgaattttactcgcccgaatatctgcacgccaccccggcgcgcccgagcgcgagcccgggctccggggaggccccggcggcgcctggcttgaggagggcgtgcggggcgcgtgagggtgcacacgcggggggctgacagcccgcaacttggagactgcggccggggccggcgttatctgttagaagtgggcgtgtcggagagagaactcaacaggtctggacgtacttctcttttaacctcgcacttttttctcttctccacccccgccccgcaagggcttgctctttagcgtttgttgttaattcgcgcctgaggtttctaagtggccccttttagaaaaagaccccctgtaaccgtaatggttttgtgctgcgatttttacaagtgctagtttgacgtttggggttgcagacttgataattgcaaccttgtaataccacttaagaccctctggcatggttcattagggccaattaatgtggctgggttatttgcaacttaaactgggggataatgtcgcttgagggagcgttttcgttttaggaaatattgttttggtttcgggtttgaaggcagctgtcaaaaaagcggcatggaaattcattgggctccattcgatacctcgtgtttagagatcgttatcgcctcagataaacggggcagagaggtggggagataagcagtttaccctcaagatttgtagtggcaagtccacacccctctctctaccttcatattcacttttcagtgagggccagtgacatttatgctgcctaacgtcatcgcataggaaaagttaccttttattggacgggatttgactatagtgtcccaaatgcgcttctccgtcttagcccatctcttaaaacaccctgattaacgatatactaacagtcttactctcttgagaataggctgagaattgggataggtgaaggtttggataggtgaaggcagagaaaattattttgaacattttactggatacagttgtacctgaatttatatgaatgtgattttacggttctgtgtttttccatttttcagtacttcgatatttgtttggaaaggaaagaacttagagatgtaatagcatttcatattgaggatctcaagcaatgtaaacaaatgtagcttaatctagatgtttttgtgagttatgataagggtcagctatatttaagttatgtaagctaacaacgtagtgagaaactactacaccttctcttctgctctttaaaatctaaattttagttggcctatataaagtgtatctcatttcatatatccaaaatttggaggtaggcacatccagtcagaagtatgggttaaaaagccttttcccagcctgtcggaagataagcagatcagcattgtttatttttcaaagaaaacgtgcatggttcaccagttggttgtactcaaaggtttggatgtgtgactagctggtaggagggaaatttggaagtaattagggattgagaattctagcatagtatttatcaaatgttatatgtattggttctcagaaaagcaaacagccgtgattgaaaagaggtaggaattttaatgatcacacttcctttttttgaaattaaatactttgacatcaacttgaaccttcagaataatcagatgtaatgaattataatgtctgtgattaacaaagctacacgttcagtgagcggcaggatgaatagccaagcttagttcgatacacttttgccctcagctgtgcaaatggattgcattgtacttttaaatgtggcatgctgaatgggagcaggggacatggctttttattctggaagatagaaactactcttctggtaacaaagaatttgattcggagttaactaaaaggttcatttaacaagctgcctcttactaatcggatcaggaagataatgtgactttagagcttatgatgttttccccccgtttttgttttttgttttgtagttgatattcactgatggactccaaagaatcattaactcctggtagagaagaaaaccccagcagtgtgcttgctcaggagaggggagatgtgatggacttctataaaaccctaagaggaggagctactgtgaaggtttctgcgtcttcaccctcactggctgtcgcttctcaatcagactccaagcagcgaagacttttggttgattttccaaaaggctcagtaagcaatgcgcagcagccagatctgtccaaagcagtttcactctcaatgggactgtatatgggagagacagaaacaaaagtgatgggaaatgacctgggattcccacagcagggccaaatcagcctttcctcgggggaaacagacttaaagcttttggaagaaagcattgcaaacctcaataggtcgaccagtgttccagagaaccccaagagttcagcatccactgctgtgtctgctgcccccacagagaaggagtttccaaaaactcactctgatgtatcttcagaacagcaacatttgaagggccagactggcaccaacggtggcaatgtgaaattgtataccacagaccaaagcacctttgacattttgcaggatttggagttttcttctgggtccccaggtaaagagacgaatgagagtccttggagatcagacctgttgatagatgaaaactgtttgctttctcctctggcgggagaagacgattcattccttttggaaggaaactcgaatgaggactgcaagcctctcattttaccggacactaaacccaaaattaaggataatggagatctggttttgtcaagccccagtaatgtaacactgccccaagtgaaaacagaaaaagaagatttcatcgaactctgcacccctggggtaattaagcaagagaaactgggcacagtttactgtcaggcaagctttcctggagcaaatataattggtaataaaatgtctgccatttctgttcatggtgtgagtacctctggaggacagatgtaccactatgacatgaatacagcatccctttctcaacagcaggatcagaagcctatttttaatgtcattccaccaattcccgttggttccgaaaattggaataggtgccaaggatctggagatgacaacttgacttctctggggactctgaacttccctggtcgaacagttttttctaatggctattcaaggtaagatcagtgtttttctgtttcttaagaatggtacatttaaggtagattaatagatgtaaatcttcattgatttatatgtgttctctaaagattcatgtgcttttttatatgaataagtttaagtggccttttgaaagtaggaaaggtagacaacctaagtgacatctgtacgtaaccatttcaggttttttccttaaatagtggttttcagtatcccattggccaacggtgaggattttatttaacatttttaaaataatgttgctcattaacagatatcttaacgaaaaattatataaattcaggagagtataatgtctcataatatcatattgtgttgtgcatggtcattcagctgttttagaatatgttcttatattacaataaatgatacccttacttacatagtcaaaagttgtgctgccttatttgtaaattcgttaagtgttagcttgagattaaagagttaaaagcagaagtactaacaaagagccctattcttcaaactgaatcttctgttaaagaatttgagttttgaagttgctaaagcaatgcagtgaacagtgtaccagaccatagtattagacacaggtcttgctcacagggttcttgccataaagtagacaagttatgtctgctgatcaatctctttaagagaggaattggtgtcaacatggtgcaaaacaaaattttacgttcaaatgttcctgcaagttctcaagtagataactgatggccaaaattgttaagcttcaattttcagctttcgtttgatttttctcttttttttactcagtcgtttataagcatactgatatttttgtctgacccaaaaaggtcagaaaatggaattatcagaaaaaagttctaaatgtagatatacgtgttggtaggggtgaatttctctaccccgtaacctcatccccaattcagataaatgctaggttttatatccattttagttgtgaaggaaaatataaaaatgtggattgtagtgacacaagattgattaatcagcgggtttttttaaaagaagacatggtagacagtgatttatttgtatgtaactattgaagttttttcttaaatgttagtgatattcatcgttcccattaactagttattcagatttttgaaaatcctttttctgtgaaagctatcctaacctggaggatgtctcttttctttcctctgtacttaagaagcttttcttgttagggaaataatttagaattagatttaggctatgttctgttcttctaaaaggcttagttgtcaaaaaaaaaaaaaaaaaacaccaaaaaaccttggttcttacatgtcttaatgtgaactacctcctaatctattgtttaaataattatcctttatttagaagaacactacttcaacctgagttgaaggtttaaaatcttttcagtaaggagatttgagatctttattattgcataagctgttgtgttttaaatgctaaaagacatgctgtgttttaaaattttcaattgcaaatttttggcaatagaattcgcatacttggttttcttaaaagagttaagtacggttgatttgactaagctatctgtaggaaactcttaaattgatttataaaacatgtaattatacaaagaaaaataaaacatcttaggaaactcttggggattattaatggattttgccctgataatcatcatggcatggttttcattttccttactataaagaaaaggcaagggacaaaacttattttccatttgctatgaacttttaaaccctataaaatctgggatatagagtataagtagatgaacatagttactcttaaatcactaaaggtgattttaatgctttaacttttatagtacttcatgacataaagtatctttacgtatttttaatttgggtcccataaccttatggaggtagtaggcaaggcaatgatgatgcggctctttagaagttctttaatatcaaatgaaattattatttttatgccaatctgtgattgggaaatataatcagtagtctgtgtcctaacaagaaggtataatactttatacagggtattttgttaatatttgaagattttataccttatggcattaacttagcactgggaactatgattacccaaaacaaagcttcatccaaataaattgaaacagtgtttcttttaaaccatcattgaattagtctattgtttccaaacaacagccctgatatagctaaaattagttgctttctcttctctatatgttacatgactgtagccaaacatttgctatgaccagtgaccctgagtgatcagcaaataatcaacacattgagaccacaacttgaatactgaccttctgactttacgaagaaaaatattaaatgccactaataacttgaattccttttaaattaaaaaaagttataaattgcaatttgactttttaaaatgccacctaaaattgtttttatcagaatacttaaaaaaaaatcctcactttattctctgggggtgggaagaggcaattccttccttccaccacaacattgaattatcacataaaattgtaaaattatgaatattatgattgagcttagtaaagcattttctaagttcatttatagtaaaacaagagaaaccttattctcaaaatctattctttaagtaaaacaaactagtcattctaacttaatatgcttttaaaaatactgaagttcagtacatttagcataaacttattgacgaaggcacatttctgcattatttgattttcagccttgtttcatttaagcattaatgacagaggtagagaacagaaatggttttaggtggtattagagcttttattgggattatgttgaaattttagtgttaaaaaattgttcgtatcctgaagggagggattattggagagaatgaatgatgtaggatgaacttgtaaattcagttttcggcagagtctaaaattaagtgatgattggcacttaatgaagctactaaaatttatgtagattttaatgtctcattagtaatcgcatctgtatctggttttataaaagtaatgaaattgaagacctgtacaaatacagaatgaatgaagcaaattctgctaacatcatgttgaatgttttctcagaaaaagaggaaatacgaagagaagagatttgttttgactgtgatttaccctcacccccatggatactttctttacttcctaccttttttctttttcttttccttctaaagattctggcaatgggtgtttcagtgttttttaagcttaatatttctggtactcatttatgtaaagtgatttctgaatgttaaaggagatttctttttaaatatattttcacttatttttagctttatgatgagaatcttattttttaaatctgtaacttgttatggctacatgattagtaaaaaaagtttttaaaacacactgtgtattcaggtgtgtcattttagtgtgaaatgactaatgcagaaatatgtgactagcatgtggtcagattttattgaaattacttacgatgtttctatggctagtccccttgtatttttataattggtaacataattcatatgttattttggtcttgtctatttgtgttacatgtattttagtctgaccacttttgctacttatttaatgtttatacattttatgaaagacttattctgaaatataccttgcataaatgtaggttaaatgcaaattgtattaatagtgaaatggatatgtgggtagagatcactttaggggccttttgagatttagtgaaggaaagattggatcaaaagggtttactttaatgtgactgcctaatgtgaaagtcggaacatctgcattaattggttagttacataaatcttagtctactctggcctgcaggtgactgaaacagcccaggaaatcttaatttacattaagcttagacaaggtctgaggcttaggcttagttcttaaagcacattcttttttactttaatgattattcctaattttaatgagcagtgggttctcattgtgtactagtacttaggtgggcaaattaaataagcaaaataggtttgtgctgaatagcatttacccttctgaggacatcctggtaatattttcatcaagagtaattgtgtaatgcaatatttacaggtatttgccagattaatgggcacttgttttcatatttctgagtcatggaaaatatacattgatgattcctgttgcataaagagttttcaagaaaattttgttgaattaagctataactacaaaaaaaaatccattacatattgacctttagaaaggatttttaaaagcccatgctgtccttatttctgcagcttcagagagccgactgctcttattttcttctggcatattctattaatacttgggttttgtatttttcaagtaaataaaatattcctattgagaatttcaattttaaaaaagaaaaggtctactaagtgttcctttccctgttgaattatgtgtgatcatttctatgctaaactagattagggtgtgacttgtgatggtgatttttgttcattttacatattaagaaagaaatagaattttattgcagttcaaaattatttgtagacagtggttttaacccccagacacctaattgtgacaggttgctttccttagtgctcaatactgttgtaaatgtctctaaatacagaatttccagtggagttcatgaattaattgggggtggagggtgaagagggaggagcaacagagatgtgggatgctatagataagtttaggaatatccagatcagttctgaaaactaacagtttggatcaactgtcatgaattagaggtttaagaaaagaaaaatttaggactataggtacaagggaatgcatcaatcagaattacaatttaatttcttttatttcaggtagaaatctaaaactgaccatggctatataatactaatttttgagttatgttgtttcttactatgctttattatcaaaaaaggataaaatgcacattttacttgaagattattttagctaagattaagttcatatttttctcatttttatttaagctgctgtttaataaatgaaaatctaatgacttgaatgtagtcgacctaatgtcttaatgttgatataatcatttcatatatcatagtgcccttttacagccattgtcaactgactggagagcaacccttttctttggtaatatatttctatgggttatgtatttttctgctggaatattgagaaaattaatttttcataatatgcagaataaattatggggttctgcaagtgctagacagtcacttaaaccatttatattgcaatacattccttaaattcagtattttgaatgaaagtgtgttatccccgaattttatcacttgtccaatttaaatattaattacatcccaatagagctgcatgcttaaacatgctttttcagagtaacccaagtattaatttcgagtgcttttaaatattttttctttttagcaagtttcaacaacattaatcctgtctataatgcagcaagttcagtgaaagtacctgttgttttataatttttttttcattctcactgtagggcaccaaaaatatatataaggggaaaaaagttttaatgatatgattagttgtaaatgtttacgcattatcttaccttgaatttttatttttgtaactaataatttgagagttcaataagtatgcagtgtttaagacatagtttgttgcaaaaagtgttaacttactatttctttttacaataaaattagcctttattctagttgatttcataactgtccataatatttagctgtggctattatgaaagtatatttgatagccaaattttgaaagctattatgaaatgatacaattcactacatgatttattatttcatgctggttggggcagtgctgtgacttatgaccttatgattgtcacatgctgaacactaaagctctaccagtttgttatggacactgttttactttatgttatcgttttaatgttttcttttataattattgaggataagagcttccttaattttaagactatttaaattgcagattttgcttttttatttttttaaccatcccttccaaagaatttgatttagatattcagtagtagaaacagaagaaaaatactcaactaaaagtccaaagacctagtttctaatgctaagggagacagtccatggcctccaactaggtactttggagtcaaaaatactttctttacaactgtgtttgaattgttttcaaaacacctgtgtgtgtgtttctaaaattccacaatccttttaacccgtcaatttgatgagggaagtaattagggtagggaatggtataacaaagttggttctttgacattttctttatagattatcgaatgtaagacaaatagatgtgaatgcagatttggtgtttttataagataaggatttaaaataatgtagttggtgatatataaaaataaactattgctgctgttagcacccgagaggtggggctcttgggttctcagagcttgttttctatgttcgttacagttattttagattagaacttaaaagaacttgagagtttccctaattctaccccctaattttttcgaatgagaaattgagatccatagaaagtgttgaggtaaagatcacaaaacacttaatgagcggtgttgccagtttgaatatctcaattcttagttatctaagttccctggtaggcttctttaattatctgggtctcttctagacatctggaacaaatagttgattgacataatacagactagccacatattttataagagttacttttgactcatttagatttttaaaatatacagtgtctgtattcttctctattcattttgttaatttttttttacctaataatgattaagcaccaattatgtgacagcactatgctaagcactttgcatgcattcatctcatttaaatctcaactctgtgaaagtttttattctagttactgtattaagtctcaattctgtcaatatccatgaagcacagaaggcagctgttatttaccttaattttacagatgtgaaaactaaaggcatttaaagagaaaaagaaaaaaaaaaccaggaaaccttaacacttatctgaagggaaatatttaatattgggtatgttagttcctcatgtatctttaataatttttgtcaacagcgaatctttaaataaaatataaaggatcaggcctctgctctcctgcatatatttgtaaagtcacttactgctttttgtcacagtttcaatttctgtaaaatagtgagagggtttttacctgacaggatttgtgcatgtacgtttactttgaaaattaaaaagcattaggccaggcgcggtggctcacgcctgtaatcccagcactttgggaggccgaggcgggcagatcatgaggtcaggagattgagaccatcctggctaacacggtgaaaccctgtctctactaaaaatacagaaaattagccgggcatggtggctggtgcctgtagtcccagctactcgggagcctgaggcaggagaatggtgtgaacctgggaggcggagcttgcagtgagccgaggttgcaccactgcactccagcctgggcgacagagcgagtctccgtctcaaaaaaaagaaaaaaaaaagaaaagaaaattaaaaagcattataaaaatgcaaggtggaatttttaaagctctgccaagtccacttagcttaaaccagcatgactctcattggctaagtacgttatgacatctgtgactgtggtgtaggtattgcctataatcaagaatcttttagggtctgctatgtgcaatccctgaagggtcatggatcgcagtttcataaagactgctgtattttaaagccttcaaatgccaacgtagtatcttcacaatgattttttttttcagttttattattttttgaaagcgccttcgacaaagttttcagtggattttgttgagggatattaagtatgccatctacataatagccatagtgataactccaaccacattgttatatttttattaataaatgctagagtattctctttctggtatttcctattctgatatttttatataatcaagtatgcaaagattctttgtcattggaaaccttaatttgcctgaaaatgggaatgaaattttcaggtttaaaatttttttacatttattacatttattgaagctgtctgaaaaagctcttgagtatattgaataccaaaatttatcctaactgcataaagttgggaggattgtgaaacttgactgcactgacttgttttctttattgatcaaatggttgaaaaaaacttcagttaaacaaatttgatctattaaaccaaagttataaaagcagaggaaagcatagaattattaaacggcagtttaaattggtaaacataccgatgtagaacctaagtttgtaggcagctttcttagatggaaacttaaaaaaattttaatcagaacattatgtgaaatttgtcatctggaattcagctgggtttattaaggacaaagtgtatggctataaaatagattgagttttttttttaaaacagaaaacccaaaataaatgttctaagtttccaccttaggaggctatgtatattgctcctctttgaaactgccttcagaaccaccttgtaagccataaaagaaaatcggactcattgcactatagtaacacctaactgttcttgctcaaagaaaatgtatttatcccttagctttatttgtgtgactccaaatcatatgagtattgccagatatttagaaatttaatcctctctcgaatgataacatttattttctttgagggtttttaaaagagcccacatagatatttctacagaaaatgtttaattctgttttgaatatgcctggaataagtgaatagcttcccagggtgactattctgaaatgggtgatgcttagtggttaagttctgatttgtgttttcttgaagttattaaggaactttatgataacagtttatatattccctcttcttggcatagtaatgaagtaatagagactattcacctctaagcctgattttttaaataagtgtttattttatgtttaagtaaggtaggtctgcttttggcttggacttgaatttggcaatagcagatataaagtaaacataatgtgaattcctacaacagtctcccaaacagtttaatttctcattcatacacatttcccttagtgtatcagggaattaagtatctgattatcagtatagcaagaacaactcaagtatactgaagttatttatactcataaaatagtttgagttatagctacaatataaaattaatatatttttgacttttattcctcacaacctgaaaaaaacctctgcgattactgatagtacttttaaaaactaaatgaattttgttactactatttgctaaatttagtcatgtttactgttcaaaaaatgctaggttaaaatggatcctaatctttgaaatgatgaagacatgtgtagtggtgtcaaaaataggatattcattttgtaactattctgttagtgccgaagttcttagaatttctttgtgacaacagcctgcttaagaactttagattttttagaattgtactaaaagcaaactgttttcttggatatttgttctttctccccaaaagatgatttataagttttcagagctaagaaatgggaaggaagagccatcctagcatggcaggtaatgttttactgctaacaggttttctctgcactgctttatttgccttgaacctcttactttgttctgtcagctgggaggctggtagattttctattaggtagcaaatgcttctcatcactaaacacatatcatgggctggtgttagtgcagtctgtggatgggcactacatttttaatcaagaaatgtttttaaaggaaagacaaattggtgaagtaatttctaattcagtattttagggatgagtgaccttttaattgataatgatatttaacagagctgtacagtgctttgggggtcccacagacatgtttaaacaagaaaacagtaaataaggaagccagaaggaaaagttataaaactattaagaaagaaaatgaaaattctaaacttcaattctggtgcctggctaaatttgatttttgtatgcctcagtgtttctctatggacactgggaaatcaataagcaacctagctacgttattatgttcgtaagtggaagaactaaagaactacaaagacatgttctaggccaagaattctggtggtaggtagagtgggaggttaactagatgatctccaaggtccttctaattgcacttggcagcagcaagcatttatcaagctagacactgggcatatggagatgaagaagatgaatatccccagcagcatggagagcactctgatgatagtcatccctgcctccccctccctcagtttgctttttgaaatgtgagcttgaaagatctcaaactccttcctgggaagacataactgaaacttcatggaggaaagtgcatgaatgaatgggaaacaagatttgattcaactatttggaataagaaaaggggcaacaaggagtctgaaacaaatgaaagaaaagatggaaagaattagttgactagatgaggactgagtacataggaatgagccaacaggagacttcagcaactaatggatgaaagtattatgtgcatgcatgttgtcatcaaatatcacatgatacaagacaaggagaaaacatgactttcaccataacctcagtttgtgtaccctagttgcaagatatttttttcttctagtcacttaagaatatccttattgtctaggagaaataatcctctttctgggctccccagtgtataagcccaaatctgaggaaaatttacctgaaatgttctttccccagatacccacatggtttactctctcatttaaatgtcagctctgtaaaagagatctctgactgctctatctgaaatagtagaatctttcacagtctttccttcttcttgacatcatctatttgtgtcttatctgctcacctgctacaatgtaagctccatgagagcagtgatactgtctgccttgcttactcctgtatgccagcgtctagaatagtgtctagcacatagtaagacctctacaaatacatgttgaatacctaaataaacaaaatttaacatataaaccaaaaagatatataggaatggattatatttctaatctttctcgagtgaggaaaatgtcagcagatagtgaatatcactgagagagagatgatagcccaggttatcttccccagatagaaataagccttaagactgacaggtgtatatgaatacagagagtatacataaagaagatgtattttcaattgtcagtctctaaatttgctttaagacttcgaaatggattgcttttcataatttcttagaataactctggtctgtttaccattgaaaaattagagtagccaatgtttgtaaatgaagggttagagggttttttcctttggtggtttgttaaaagcttgctcaaggcagtaacatagtaaattgtcaatataggaacttttgtagcagaagctttatgcttttcacttttataagaattgagattatttaagcagatgagtctaatgtatatgtttgtactgacttacctagaaggtcaggcaagaaatcggtttcctcatttttcagataagtgtgtgtgtaatcactgagtaccttaagagaggaggggtgttttatttttgcctgaattttcaaaatatctttcttcagcttatttatattttagatttgacttattctgtctatagtatataacagtcaggaggttggtaggataagttcatctcttctactaagagttataggagagttcaacctaatatggcaatgacagtcgcagaaaagagaaaatgcaagttaagtaggtgttagccatagcaagaaaatcagatgaggtcatttaagaatgaactgctctaatgttcaggaaaaaagaggggagggacaaggacagggctctagaaggcaaccaaagagagcagccacaaaataaatgaatagctgaagaattaggagacaacaatcttaaaatgtggcagggagagggtagttgtcacattaactagcatagaagagacagaatagaataacataaatatatgagtgattattgttcttgaaaccagtctttaaaacatgggaacattcccaaaaatcaaagccagataaattagggaaatcttaaatggcacaatataactagtgatttcgtttataatttttttaaaaaggagacttaaatttgaaatttagatgtaattaaagcagataataagaaacatacttctgagaccacaaagaccctgagattcagttaagagtaaggtagaaaggctggaagccagaagggaattaagtttctgttccctgagaagccaacacaacaggaaaaaactggccacaccctagttcaaactcttattactcttatcaatagtctcctaattgtttctctagttttctcctctcccttcttaattcattctgcagtctactgccagattaatcttcctagaacaccactttcagtattattcccctgatcaaaaaatgtctgtggttttgttgctcatagcatagtggttctccttctttgtaccacagcccatatgcacgatgatagatggtgggtagccacatgaactctccataacctttggaggatttgggttatacacagtctgttatccaagaaagcatatctgagtgtaagtgagcattatagggatagtcttataattgactccttttaaaatttgttcttctttttgcaaatgccccttcagaatttacagaaatagtgtgttcattccatcagtaaaattataccccaaaatgttaataagcttatttccatcacgtctcctttcctatttctttctttcctctttcttcctgcacatctccccttatcctccacatttctctgtaattacataagcataaacagacacatatgagattttctgggttgcttgcctttaaataaaagaatgggattatcttatacccctttgtctgcagcttgcttttctcacctaacaagtacaccctgaacatccttccaggttaacagatgcggatcccattcttttaaatagacaatattctattcatgtggtttcgtgatttttgccactacaagcaagtttctaataaacacccttttctatgtaccctttacaaatagcaactttttttctaaatataaatgctatggtttggctctgtatccccacccaaatctcatcttgaattgtaatcctcacatatcaggggaggggcctggtgaaaggtgattgaatcctggaggcagacttctcctctgctgttctcatgatagtgagttctcatgagatctggttgcttgaaaatgtatggcacttccctcttcactcactgtctctcctgctctgccatgtgaaaacatggtttctttgccttccactgtgagtgtaagtttcctgaggcctcccagtaatgcttcctgttaagcctgtggaactatgagtcagttgaacctcttttctttgtaagttacccagtctcagttagttctttatagcactgtgaaaatggactagtacagaaacttggtaccaggacagtggggcattgctataaagatacatgaaaatgcggaagcaactttgtaactggataatgggcagaggttgcaacagtttggaggactcagaagaagacaggaagatgagggaatgtttggaacttcctagagacatgttgaatggttttgaccaaaatgctgatagttatatggacaataaagtccaggctgaggtggtctcaggtggagatgaggcacttattgggaactggagcaaagttcacttttgctttgctttagcaaatagactgacagcattttgcccctgccctagagatctgtggatctttgaacttgagagagatgatttagagttcgtggcagaagaaatttctaagtagcaaagcattcaatatgtggcctggctgctcctaacaacatacagtcatatgtgttcacaaagagatggtctgaagttggaacttaggtttaaaagagaagcagagcataaaagtttggaaaatttgcagcctgaccttgtggtagaaaagaaaaacctattttctggggagcaattcaagtgagctgcagaaatatgcatagatgaagagtagcctaatgttaatagccagtagaatagggaaaatgtttccagggcatgtcagagaccttcatggcagcccttcctatcacaggcctggaggtctaggaggaaaaaatggtttcgtgggccaggcccagggttgcgctgctctctgcagcctcaggacatggtgccctgcatcccagctgctctagctccagctgtggctaaaaggggccaggagataatcttgggctgttgcttcagagggggtaagcctcaaaccttggcagccttcatgtggtgttgggcctatgggtgtgcagaaggcaagagttgaggcttgaaagcctctgccttgatttcaggatgtatggaaatgcctggatgtccatgcattctgcaggggcagagccctcatggagatcctctgctagggcagtgcagaggagatacatggggttagagcccccacacagagaccccactggggcactgcctagtggagccgtgagaagagggataccatcctccagactccagagtggtagatccactgacagctttcaccatgtgcctggaaaagctgtaggcactcaatgctagcctgtgaaagcagctgcagggtctgtacccagcagagccaccagggcagagctgtccaaggccttgggagctcaccccttgtgtcagcgtggcttggacatgagacgtggagtcaaaggagatcattttggatttttaagatttaatgactgtcctgcaggtttttggacatgcatggggcctgtagcctctttgtcttaaccaatttctctagtttggaatgggggaatttacccaatgcctgtatcccaattttttcttggaagtaactagtttttgattttacagtctcataagcagagtggacttgccttgacccaagaagactttgtacttggacttttgagttaatgctggaaggagttaagacttccggggactattgagaatgcaagattgtgttttgaaatgtaagaacatgagatttaggaggggccgggggcagaataatatggcttggctgtgtgtccccacccaaatctcaatcacttgtaatccccacatgtcaggggaggggcctagtgggaggtgactgaatcacaagggtggacttccctcttgttgttctcatgatcgtgagttctcatgagacctggttgtttgaaagtgtgtggcacttcccccttctctctctgtctcctcctctgccatgtgaacatgtgcttgcttctccttcaacttccaccaggattctaagtttcctgaggcctctcagtcatgcttcctttgaagcctgtggaactgtaagtcaattaagtctctgttcttcataaattatccagacacaggtagttctttattgcagtgtgaaaacggaataatacaatagatttccccaaagttgggttcctgagtcaggggtatgtgtatttaaaattttaacagatatttccaaattacttttttcgaggattatggcaagtcacagttccccctggcagtgtttatacttttctttataataaaaatacataaatcattattactaacaaattccttgccatgagtcctaaattgataacaacataccagtgtgccatataacatagctgaggactgttgcagtctagaattcaggctccttctctctgcttttaacaatatgtgtaatgttcaagaccaatttagtgccacttattttgtatgctttcctttatgtagtccaggccatagccccccacctcatctgatggtatcctctggcagccacagaccacacagttctttctacctaaattagtcattagcacatagtaggtacccagtaaatgtttgttgaattaatactgtttatatatttctaatttatctccaagtaaatccagtctccttaaggacaaggaacgttttcactataacacctagcacttaaggtactcaatttaggtagggctgtttgaacaaagaaccacagaggaagcaaatagcatggccttgcctttaatacatatattttactttctcttagggaaaactggaactgtaagaatctagtaacaataataagaacagcacttttattgagcagttactatatgtgaggcacagttcaaactgcagaggatacaacagtggacaaagctttagttgtttctgcctttctgaagcttatggtttatgggtgttacattcaagacatttgtaggacacattctaaaatgccatccaatttcaggctctttccagcagaaactgtggaatatttttccgttcattcagcatttacttagtgcctgctctgccaggaattgaagagaaagcccaaagacaggcagaccttacctgagaggtagtgaactgaccaggatgactgtgggcagtagacttgtttcccaaactagcctcaccatttctgtatttgcatatacgaggaaaggattagatatagggattcatgtcagcatacaccccagggacatttgtttttagtgaaaggtgccagtcttcatccctgtacccagtacacaaaccacgaagaagtatgctcccgtcattgtcaaagaatcatagaattccaaatggagctagttttgatatccagatctcacttcatatgaggaaactaggtccagtattgtgagtaagaattaggactcttcagattccctgggtatgaatctgactaacaactgtgtgaacttgaccaaattcataaccctgtaaactctgtttcctcacttttaaaatgggcacaacaaagtgatgcatgtaaactgcatagcacagtgtctggcacttaaaaagcactcctgaagttatttttagtgatgtgttttaagattagacaactccttaatgccaaaggtttttacttgagaactctgtctgttgtgccatactacacgctgttcataagataagcctttttcattaattgatctcaaactggcttcattatgatcttaactttatttcagttttatttttaaaatttatttttaatttttatgggtatatagtaggcatatatatttatggggtacaggtcatgttttaatgcaagcatgcaattgtgggggtgatatataattgactggggtgagatatctcattgtagttttgatttgcatttctctgatgattaaggatgttgaacatttcttcatacacctgttggccatttgtatgtcttttgagaaatgtctattcagatcttttgtccattttttaagttggattgtttgattttttcctgttgtctgaactctttatatattctagttattaatcccttctcagatgggtagcttgcaaatattttcttccattttgtgggttgcttctttgttgtttcctttgctgtgcagaagttttttagcttgatgtgatcccatttgtccatttttgcattggttgcctgtgcatttgaggtattactaaagaaatctttgcccataccagtgtcctggagagcttcccaaatgttttcttttagtatcctagtttcaggtcttagatttagggctttagtccatttttatttgatttttatatgtggtgagagataggggtctagtttcattctgcctatggatatccagttttcccagcaccatttattgaagagactgtcctttccctagtgtatgttcttggcacctttgctgaaaatgagttcactgtaggtgtatgaatttgtttctgggttctctaggtctgtgtatctgtttttatgctagaactatgttgtttgggttattatagttttgtagcataatttgaagtcagataatgtaattcctccagttttattttttttgttcaggatggctttggctattccggggcttttgtggttccatataaatcctatgattttttttttctatttctgtgaagaatgtcattgatatttattaataaagattgcattgaatctgtagattgctttgggtagtatggacattttaacaatattgattcttccaatccatgagcatggactatctttctttttttgtgtgtcctcttcaatatttttcctcagtgttttattgttttcattgtagagctctttcacttctttcgttgagtttattcctaggtgttttattttatctgtagctattgtaaatgagattactttctgatttcttttttagattgtcctctgttggcatctagaaatgccacagatttttgtatgttgattttgtatcctgtaactgtactgaatttatctgttctaatatttttttggtggagtctttaggcttttccaataagatcatacagtctgcaaacaagaataatttgacttcttccattccattttggattccctttatatctttctcttgtctgattactctaggtaggtcttccagtacttccagttgaataacagtgggcactcttgtcttgttgtagatcttagaagaaaggctttcagtttttccccattcagtatgatactagctgtcagtttgttgcagatggcataactttcaaactaattgattatagttaggaagtggatactttaacttgtggtaccattatcagatttatatttcggccataagcttgaagaggagctgaaaaatgcatatgtgatgcatatgcttcctatttggctctcttctcccacccccctgccctataatccacacaagttcctctctcagtcactcatcaactacttgaacctctgaggaacttggggttaaggtaaattagaataaaactgtctgaagaagagcaagcctttcatgtcttgagaaattcttggggttttagaaataacttcattgctttttttctccagttactttggcttcttcttaaagagaatactaacactttgaacgtcataatactaaggttctgcctcttcaaataaagactttaaaaaaaaatggtttttgtatgattcagtgtgaattaaatcccacagtgtaaaggactttactttcttaatgtagattttcaaatacacaattactgatgtttataagtagatttattacaccaaagcacctagcaaattcttgaatggatcaggtcttatttttcagtcttactttgcaaatttaagtcaaataattaaggatttgttaaatatttgtcttaatatcaagcttttgcatatcggggccctcttttataagctttataagcaatcttttgttttctctgcttgctcaaagtagctatgtttgttgtatctgttagtatttgctctataacaaacatactgggtgccttcccacttagatttggcaattatcactcctgtaaatgagatattacataagataggaaaaagaacagtatctttccaagaagaatagtatccttccatattaacagtttagagctgactgcttttaaaatttagtggctttaaaataacaaccatttattattcttcatgagtctacaaatgaggtgggcagttctgctgatctggccaagctgaacttatctcagctgggcacattcagcgtatctgctgtcagttggctggttggctgtagcaatgaatggtgaaagtaggctgcccttaactttttcacacagtagcattagagttacaaaagaaccagcagaaccatgcaaaactctttaagacctaggcttggaacaactatatttctaccacattctattggtcaaagcaaatcacggggctagtctagattcaagtgggtggaggagctgcaattacactgcaaaggagtgtgactgtagggagaggtgtttttttatttttatttttttgcgatttgtcacagtagttgtaggaatcaggtgtatttaaaattctgatccttctgtgatatccgaattgttcatgaaccttgcctctggtggaaaggcagaatcattgtgacagaaggataaaatcttggaatttagagactaacaaaggttcagattccagctccatcacttatttctgcaatcctgcagaagttaatcttcctgataggcattcagtaatgattgattcacctgaacctcagattctttatgtattttaaagaaagggctaggtaaatgcaaagcacttatgtaactgcttttattattgcaaacctggctcccacactccattcaaggtgtaagactcagtgtcttccttgaattaaaaaggaagagaaagtgtgttagggaaaggaagagaaatatttgactaattgtggccccaataaagtgaccactcactgggggtattttcctgtaagaaaagaatggttgaggctcagagttaagagatacaaatccaaaagtctccttggggtaggattccctgtgattcatgggttgagaggtgtaacattagacacagtcccagtctagattttttttttaaagaattgtggtccatcctatacacactgggtgccttaatactatatgtggcaattatcactcctataaatcaggttttacataagataggaaaaagaacagtatcattccacattaacaattgaaagatgactgcttttaaaaaattaaaagggccatatagaaataaaatcacataaatttcttgtgttaaacatagttgtcatattggatgaggactaaacacctaaattcatccaactagtagtaatagaaaagatgaaacacacacacagtaaaactagattaatttaatttatacaaagggccagatatctcagaattcagacagtcagagatgttgactagagttaatgcctcttttaggagaggtaccaggtaagtgttctcaaagaactggaaactgagaccaccacctctggcattatctatttgtgaacacaagcaagtctgaatttttccgcaccatagctacctttcatgtaagcttcttttcttagaagaaaagaaggtaacatttgggtgtaattttttattaagggtgaaatttagtgtagagagtaaaggcatttggcatagaagcccttagttttttttgtttttaagttgaactgccagcctttatggattgcagtcttcgctgttttgattgacatttcccaattcattttgtattatttatttttttaagagacagggtctcactctgttacccaggctggagtgcaatggggcaaacttggatcactgcagccttgaactcctgggctcaagcaatcctcccacctcagcctcccaagtagcttggactataggtgtgcaccaccatccttggctaattttttaaatcttttgtagagacagggtagtgctctgttgcccaggctggtctcacattcctggcctcagttgatgctctggtctcagccttccaaaatgctgggattacaagtgtgagccactgcacctggcccccaatttcatcctttacaaagactactttcaaccataaatcaacggaaacttcagctccctcagacatatttgggatccaaggatattttcccaaatgattaatgctaatttcatatcaatacatttttgcaaaacctacaaaaatggactagtaaagaaagactcttaatttgggaaagacagttacttggagagaagagaaacttaagaggcaggtcgagttcagtgttcagaaatgagaggatcataaagagatagccataaaaatgtttctccctatattgcctgctgatagggtgtatcagtgaaggtcttactaaggaccttgtaccttttcagcgctgcactgcgtgctcatagggaggaaagataaatcatgtgttttttctgacctcaaaggagcctgtatctggctagagagacatgatgcagacacatgaaataattaagaaacaattaactgtagcaggtgctgaagaatataccaggaggtcagagaatggtagagctagtgtgggcgaaggtatagcccagagcatcatcagatgattcttccttatgcaaattcacatctcctctgggtcaagtatcatcctggcatgcagcagctccataggtaatgccctaaggctagcctgaggcaagttgcaaaagccatcatattgagtcatggcctttttttgtgtggggggaggggaatggcatccccttcctgtctgccaaatcaaggaatacagtgccctcctaaacctgctttgttttagtggattgttaaaaagaagtgaatgaatttatgcttcattagggaaaggttacagtggaatactgaggagtaaggggtatttctatttaacaaatgacataacttgaaggaatgaaatcataaggatggaatttcaggcattaataaaaagctgatgagagatactttgagacaaaagagccttcccagtgtaaccgagatcacagcacctacttcacatacacaggaaaccagtcctatctgtctctcccatagagcagtagctgccttgtttttcctccctcctccatcattcattctaaatctccagtcctccaccgcaccttatccaaaccctgatacccttaagtcacagatggtgaatcagtcaaaagtagtattaaaaactagtggtacacagctacacctggaatgcagtaagaaaaatacggatttctgtacatcatcttccctccctgctcttacccccatttaagagttacagggtcagaacccaagagtctgagtttttgaaagtccctaaaaattttggatgatcacctacatttagaaccactgcactaagaaggacaacaaatatgccaataaattctgttgccaaggaggtgattatgcaagctggaaccctgataacatgaggagaatcccacaatagccaaatagtccatgtactagttacattataataaagccaaaagcagcaggcctacctgactttctcctgaggtctatcatgagcttagagagaaggaacgtggacatatagaggtagctctagatggagaagggcactaggtgtcatggaaagaatcatgtgcaagaagtaaagaggtgctctgaatgtcctagccctgcttaggtgtctgtgtcctcacatgagaatttatccacagttctttcccgctgtaacaatctttggttccaactgcatttgtgagacagcaaaaagctatggtccagtctccttccattgtatcatctcatcaatgtatttctcccactacccttgtgtgaaatacaaacttttttggcttattgtgattatgcaaggtgtatgccaactttttttttttctccacatctttcagctttctgatgggtaaaaattttccttattttgctttagaaaaattctcattggcatagatctaatttcagggagcctcccttgaaagctaaataacattgagaattcatgaaaatataatgtagagcattatgcctgttagcatattagtttaaatagaagtggttcatgaaaatttttgaaatgccagaccctgtcctgtgttttgtattctcccaaatactcatccagatactgttcagaatgtaacatgattattttgaaataaagattttcccctagtttttaaaaaagttactttatacattaacccttatgttcctctttgatcaatttttccagtagtgtaaacagtcttcagggaagtagatttcttacagaaattgtcaagtggctctctgctgttagcatggttactaatcttttggttacttttcatattttttatactttctggaagtggacaacttacttgtaaataaaagtgcataatttgtattaaaaatttttagtaacaatctaatttgtaaaatagatgtgagcagcatgaatgtgtgtgatatgcgtacatacgaattatgtctcttaaaaatgtatcacagacatctttccgtgtccaaacaaatctacctcattctttctaatagccatatgggtataccataatatatttaactaggcccctattaaaagaattttgactcttttgtagctactatagtgttgcagtgtgtatctgtgtatgtatctttgtgtgtgtatctttgtacgagtgtacatatattttccccttggctatttcagatttttttttaggtttaaatcttaggaaaggttttgaaattgtcttaagtattttcagaagcattaaatcatggtttttttacatttttcttttagaagttttatgtcatctctatgagtagctttcagtaatttgttctgcataaaattcccgaaaacttccatttaaaaataggtggcatgactagactttctcagccgaaagagtgaggtcccaggaaggattttggagaagctgtgttcaaatatagctgctgacctgatgtctgcctagagtctggcaaggtgatgtgttgaatctagtgtctgcctgcatgccagcatccctttactgatgagatttgtggttttcatcacttcatggtaattatcccaagttataagatggagtctctagaaaatcagtagagtatgaaggcccaagtaaaatacatgtgagtgcatgtatgtgtgcatacaaattacttctcttaaaaacgtatcctgggcatttaaagaatgaggacctccgaaggattttgtggaagctgtgttcaagtacagctgctgagcgtatgtcagcctggagcctggcaaggtgaagtgttgaatctagtgtctttttgactcactgttttttttgactcactgtgctttgaagcccttgtcatttgggctcataaaatagatttctgtatactgtctctcctccctgccctcgcccccatttaaaagtatagtggcagaacccaagaatcagagttactaaaaactctctagaaaatttggatgatcacccacctgatcatgtcttttttactcactatgttttttttttttttgagacagagtctcgctctgtcgcccaggctggagtgcagtggcatgatcttggctcactgcaagctccgcctccctggttcacgccattctcctgcctcagcctcccatgtagctgggactacagggcctgccaccgcgcccggctaattttttgtatttttagtagagtcggggtttcactgtgttagccaggatggtcccgatctcctgacctcgtgatccacccgcctcggcctcccaaagtgctgggattacaggcgtgagccaccacacccggccctttactcactatgtttttaagcccttgttttcatttgctccactgtaaaacattccccaagccaatctggagctgaggcaaatttttaacaatttaaaatctggggaatataaatattggataatgatcatcctgaaaaaacaatgaaggtagtagcataatactttatatatcaataaaatggcaaaataagacagttgttgaaggacagaaagagtaactgaagttaggagcttatcttaacacattttttgtgtcataccataggcatcatattttttaaattttttttatttcatacacataggaaaatatatgtgtgtaagaaataataaacacctctttgtacctaccacccaacttaaggaacagctcattgctattccctttggtgctcgctggatgccctttcccagtcacatccccctcccttcccatctgcaggactatactagtaaattttgtattttttgcattattttgctttgttttatgattttactacctatctacatatccctaaataatacattatttagtttcatatgttttaactttatgttgtggaatcacattaaatgtagtcttttttttttatattatactttaagttctagggtacatgtgcacaacgtgcaggtttgttacgtaggtatacatgcgccatgttggtttgctgcacccatcaactcgtcatttacactgggtatttctcctaatgctatccctcccctagccccccaccccccgataaatgtagtctttataacttgtttttttaactcaacattgtttgtaagattcatccatgtaagctgaagcttttttatagagatctttgttaagccttttaatgaatacagtacatacatttctctgttcccctgttagtggacacttggattgtttccagagttttgctgttttgaacaacgctgctgtgaaaatgtctcctgaaacacatttataagagtttttttttccccaagggaattatacctagaaattgaataactagatcacaaggcatacacatctacaacttctgctaggtaatgccaaattgtttccaaggagcgttagaagtgttctcatcaacttttactagtgctagtcttttacatttgtggcagtatggtgggtgtgaaatatttatgtttagtttttcttggtgccatttaataatttttataaaaaatatttagaagtcaaggcagttttttgtttttgtttttattttttgcttgttttgttttaatgcagacattgagattacgacttggaataaacattggttgcaaagttcctaaaaggaaaactttttttggtattctggagcttttctggtactgaataaaataagtatgttaaattatgcatgtgtagtttagaagtcagagcaataattgtgattgttgaacagaatggcagtaaaaagtttctaaacgattgtactgtacaagggacacttgttgtgggtcagttttagcctccccaacttttatgttaaaagttgcaacaaggtttaagggcttatgtttgataggccagatggtgaccagctgtgataaaacacagggaacccttgcaaaggatttcaaaatttatgcagtagtccgccttatctgcagttttgctttccaaggtttcagttacccgcagtcaactgtgttctgaaaatattaagtgaaaaattacagaaataaagaatcgaagagttttaaattttatgcttcccacccatcccacctgggatgtgaatcattcctttgttcagcatctccatgctgtaggtgctgcctgccccttagtcacttggtagccatccaggttatcagattgactcttctagtattacaacacttggcttcaagtaatccttattttacttcatagtggccccaaagtgcaggagtggtgatcctggcaattcagatatgtcaaagagaagctgtaaattgcttcccttaagtgaaagatgaaaattctagacttatatataaagaaaagaaatcatatgctgagactgctaagatctatgataagaatgaatcttttatacatgaaattgtgaagaatgaaaaagaaatgcgtgctggttttgctgtcatatctcagactgcaaaagtttgcagccaatgtgtatgataagtgcttagttaaaaggaaaaaggcatttaaggtaagtatatatagtgtttggtactacctgtgatttcaggcatccattgggggtctcctgagtataaggggagactactcttttagtgttaaatgaacactaaggaacagagatggggaagaggttggagaagattagttcagcagtttgagtataggtaaacagttgtttgagaaagaagaaaaatgtgattagtattttaccttagcaatagtggcatagataatgataaattatagtcacacagaactcttagtatttacagaacgttcacatttgtgatcccatttaacaataactctgaaagaaaggtatcatctaccactgctttattgataaagatataaaaggtaagagagatgaaacatattggccaatgatacccatctggtaagagacagggatggggtgggaccccaaggctcttctcgccaagcccacggtttttttgctttatacttttttgcctcctgatcaccatggctgcagtttctactgtggacaatgtctgtcagcaagcattgatcccctgccttcagcactcttacgtcttagcaaggactggaaagaaaaagccaggagtttacagtctgctggagcaacagaaaagaatgatatgaaatatgaagagaccaaaatgatttataataaggtgctagactatgtagtaaaaatctgctttagctgtaagtcaaaagcaagagcagtcttttcagaatggaatagaaatgttggaattaaaggaattttcaaagttgtgaatttttttcaagataaacatgttttattttggtaattatggtattactaatttgataaccttcagggagccacctaatattatagaagatgtacatataatgacaaaagcaaacattttatttttaaggaccacaatctaatctaaaacaaaatttcccccttttctggtctttggttaattaaggacttatttaaatatcaaagaaagacacatagaaaacatttagtatatttctatacttttattaatgtcctccataccttacacagatacttgacttggctatggtctagataatccatgaaaatttaaaggacagattttaacaactttatgctaaattgatagatctctaggatcagattgccatcactctcagatgcgaagcttccaaccacttataggttcctgatatcttgcttttatacagacctaatttctcttcctttaaactttcttttcctcagttgctatttgattgaaatattgagtcattaaaaatttccaagtgggaatttttgtgtttctgcatctatcatgaagctgctcaaataagtaggtgtttgaataggagtagaaacagtaataggctgaagccagaccaatacagcttcagctaaatgccgaccttgctaaagtctgggaggaccggtgtggtattctacaatgtacaagtctgtagccggtgcccttaatatgttggcttcatgtctcatgactctcttctgtaaatatgcagtttaaaaaatacaagttattctgctgtagaagatacatttgcaaaattgatgtatcccctctaagtaaagttggctaaacaataaggacatatttataattaatgaatttgagaagaatgctgacgatatgcattattctttgaagttaacatttttcaggtcctaaataaacaaaaagtaggttacttctgtctggagtgtatgcaaggggtaccatcttgtccttggttcctggctgctattccaaggtgctataaagtcagctaaagagagcaatcataatacattgatagcatccctcaatgtgtttctgagctacttgagaatcttatttttgaataggtagcaggaaaccatctttgcagggcagcatgggcaaagggattggagggactattattataaagatccactgaactgcttcagtatcataatatcttaaactaaaggactggaaagagccagattccaatttaatctgctcttctatgaattcttagctgggttcatttaaaaagaaaaaacttgaagattgcaagattttgaagacatcttaaaataggtgaactccaaggtgcactttaaacttgagactgataactgaatactccttcaccttttgatctgatattgtcaaaatgaatgaggacttagtgctctagtaagtttggaacagaatgatattaatttattttctcatgattgattcttttttgctttttaatagattaaacttcaccgtagaacagtttctcaacctctggactattgacatttttgattggataattctttgctgtcagggctgttctgtgtgttgcaggatagttagcaacatccctgacaatcacaaatgttactttctgtctctatggatttgcctattctggacatttcgtataaatagaatcatatatatgtggcttcttgtacctggcttatttcacttaacatgttttcaaggttcatccatattgtagcatgtaacagcacttcattttctttttatggctgagtaatattctgttatgtggatatactaccatattttgtctatccactccttagctgatggtcttttaggttgtgtccattctttggctattataaataatgctgttaagaacattcatatacaagtttctgtgtagacatatatctttatttctcttgtgtggatacctaggagtagaattactggatcatatgataactctatgtgttaccttttgaggaactgccaaacatttttctacagtggctgtatcattttacactcccatcagcaatgtataagaattccaatttctctgtccttgcctatatttattaactgtcttttcttattagccaactgctgtggttcgaatgtttgtcccctccaaaactcatgttggaacataatccccaatgtggcagtattgagatgtgaggcctttaagaagtgcttgggtcatcagaggtctgccctcatgaataggctaatccattcatgagttaatgtactaatgggttatcactggattgggactagtggctttataagaagaggaagagaactaatctagtaagctcagccttctcactatgtgattgctgccctgtgtcaccttgggactctgcagagagtcctccagcagcaagaagttcttcatcagctgtggccccttgaccttggacttcccagcctccagaaatgtaagaaatccatttcttttttttaataaattacacagtctcacgtattcagttataccaacagaacacagactaagacaccatcctattgggtatgggtatctcattgtgttttttatttgtgtctcccaaatgactaacgatgttgaacatcttttcatctgctttttggacatttgtgtattttctttgaagaaatgtctttaacattctttgcccattttaaaattaggttgtctttttattgttgagttgtcggtgtgtgtgtgtgtgtgtgtgtgtgtgtgtgtgtatctagaatatatgtgtatgtatatatgcagatatattctaaacactagacccttatgaaatatataatttgaggacaatttctcccatttaaaaggccatcttttcacttcttgatagtgtcatttgactcacaagtttttaatttttatgaagtccaatttattttttaattctttgtttttggcactgtatctttaaaaagttgcctgatctaaggtcaaactgattttcacctatgttttcatctaagaattatagttttagctcttacatttaggcctttgatccattttgaattaatttgtgtatatggtgtgaagtagggctctaacttattcttttgtgtaatgatacctagttgtcccagcaccatttgttgaaaagattattctttccccattgaatggtcttgataccttgttgaaatcaactgaccataaatatataggcttattcctggactcacaattctatgagtctgtatgtctaatcttatgccagtaccacactgttttgattattacatctttgtacaaagttttgaaattgggaaatgtgagtcttccaactttgttcttttttaagattactttgcctatattccgtgttcgttgcaaactcatatgaattttaaatcaactctccatttctggaagaaaaaaagaggcaattgaagttcagatagggattgcattgaacctgtagatcagtttggggaatattgccatcataacaattagtaggtcttccaacccatgaatacaagacttctttccatttctgtagatatttagtttctttcattaatattttgtagttttcaatataaaagtcttgtacttcgattaaatttattcttgaatattttgggttttgatgcttttatgaatttgttttcttaatttcactttaagattgttcattgctactgattagtaatgcaactgatttttgtgtgttgatttttgtatcctgcaacctagctgaaatcattgattagcataatagagtatttaatagatttaggatttctatatataagatcatgtcatctgcaattagagataattttacttcttccctttcaatctggacattttttacttctttttcttgcctagttgccctagctagaacctccagtgcagtgttgaatagcagtggtgagaatgagcatctttgtgttggtcttcatcttgtggggaaacctttcagtttaagtgtgttgttgtggggttttcatagttgtcctttatcagattgagaatgttcctttctgttcctagtttgttgagtgttttctttttgattgttttaatcaggaaagggcattagattttgtcaaatgctttttctgcagctattgagatttttgtgtgtttttctggtcttttatggtttatcacattaattgattttcatatgtcaaacaaaccctgtgttcttgggtttcatctcacttggttatggtttataatcctttttatatacttgtagattcagtttgccagtattttgttgaggatgcttgcatttatatttataagggatattggtctgttgtagctgaccagtaagtatagtaagctgtatagtttactaagtgttccctctgttttgggggagactttgagaagaaggattgttggtaattgttctttaaacatttggtaaaattcactagtgaagccatctggggtcttctttggaagttttttgattactaacttaatgtctttacttgtttgttataagtccattcagatttttttctccttgagtcatttttgacagttggttgaggaatttgttcatttcatgtagttatctaattggttagtgtataattattcatagtattcctttataatcttatttttttgctgtaaggtcagtcataatgttcactctttcatttcggattctggtaatttaagagtcttctctccttttttttcttggtcagtctagctaaagtaaagttttgtccgttttcaggggaacagctttttttttttttttgaggcagaatttccatcttgtcacccagtctagagtgcagtggtgcaatctcggctcattgcagcctccgcttcccgggttcaagagattctcctgcctcagcttgccaagtagctgggattacaagcgcccaccaccacgcctggctaattttttatatttttagtagagacggggtttcaccatgttgggcaggctggtctcgaactcctgacctcaggtgatctgcctgccttggcctcccaaagtgctgggattacaggtgtgagctaccgtgcccaacccagctttggttatttttgttgacctactctattgtttttctcttctctatttcacttatttctacactggtctttattattttcttccttatgcttgctttggacttagttcttctttttctagtctcttaaggtggataattaagttcctgatttgaattcttacttctttgtaaggtggtcatgtactgctatgaatttccttctcagaaatgtatatgctttcactgcatcccttaagatttggtatgttgtatttttgttttcatttgtctcaaggtatagtcttctgatttccattgtgatttcttccccctctaacccgtttattatttaggaacttgttgatttccacatacctgtgaactttccagatttccttctttgttaattctcagtgtcattccattctggtccgagaacatactttgtatgatttctatcttttaaaatttatttggcttgtcttatgacctaatacattgtctatcctggaggatgtttcatgtacacttgagaagaatgtgtattctgcttttgttgggtagagtgtttgacaggtgtgttggtacatagttctgttcaaatctgtttccttgcagatttctatctagttgttctgtctattggaagtaggatattgaaatctccaactaatattgctgaattgtttattgttttcttcagttctgtcactttttgctttatatattttgaaattctattgttaggtacaagtaagtttatgattattatatcttcttgatagattgattcttttatcattatacagtgccctataagaacaatttttatcttaagtctatttgtctatattagtatagccacttcagctttcttttgtttactgtttgcatggaatattttcttcttttactttctatttgtgttcttgagtctaaggtgaatctctgtagatagcaattggatctgccaatctttgctttttatttggggagtttaaaccattgacatttaatgtaattattgatgaggaagattacttctgatattttgccatttgtttcctttattttgtgtctcttgttcttaaattcttccattactaccttctttcttttgtattacatattttctagtgtaacgattttaatttctttgtcatttcttttgttgtatgtttttagttattttcttagtggttgccacggagattttattgtcattttaacagcctaggttgggcacagtggctcatgcctgtaatcccagcactttgggagactgaggcaggaggatagcttgagtccaggagttcaagaccagcctgggcaacttactgagatactgtctctacaaaaaaatacaaaaattagccaggcatggtggtgtgtgcctgtagtcccagatgcttgagaggctgagttgggaggatagcttgagcccaggaggttgaggctgcagtgaactttgatcacaccactgcactccagcctgggtaccagggcaaaactagcccaaagaaatgaaggaaaaaaaaaatctaatttagattaatatcaactcaacttcaacagtgtataaaaactttgcctctgtatacctcttctgcttccactctgtgctgttattgtcatagattttcatctttctacactgtgtgtttatcaatgtagatttaaaaatattgcttagtagttgtctttagaatccgatacggagaaaaggagatataaacaaaagatgcatttttactgtcttgtatgtttacttatgtaattccctttcctgatgttgtatttctaaaggcaaagtagggttattgtgagtgtccttttgtttcaacctgaaagactccttttagcatgtgttggagatatgctaatgatggactctcacagtttttgttatctgggaatgtgttaatttatccttcatttttgaaggatagtgttggcaggatacagaattcttggttgacatgtaattctttcagcattatgaatatgtcatcgtactgtcttctgacctccatggtttctgataaggaatcaactgttaatcttattgaggatcacttgtttgtaatgacttgcttgtcgtgctgctttcaagattcattctttgcctttagcttttggtagtttgattgtgatgcatttaggtgtgtactttattagtctgttctacttggagtttgttgagctttgtagatgtatttcatcagatgtgtcaagttcttttgccactattttttttttaaataatctttttgcccctttccgctccttctgtcactctgattatttgtgtgttgctttgtttggtggtgtcccagaagtctctgagactctgtccagttttttcctccccattcttttttctttcacttcctcagactggatgatctcaatttgacctatcttcgagttcatggattttctcttctccaagtgacatctgtgagatgaatttttttctagagaatttttcatttcagttattctacttcaaaatttctctttggttcagttttatcattgctatctttatattattctcagtttaatgagatactgttttatactttcctttagttctttagacatagtttatgtcactgaatatatttaaaatagctgattttaagtcttttttttttatttttttggagatggagtctcgctctgtcacccaggctggagtgcagtggcacgatctcagctcactgcaagctccacctcctgggttcacgcaatgattttaagtctttgtctatgaagtctagtatctgggcttcctcaggcatagtttctgttttctttctttcttttcctgtgtacttcgtttctttgtataccttgtaattgttgttgttaactggacattttgaatattatagtgtaacaactctggcagtcagactgtctcccctccccagtatttgttgttggtgagtattgtagatgtttgtttagtgacttttcatggctaattctgtaaattttatattctttgaagattgtgggcaccctgaagtctctgtttgttagtttagtggtcacctaataattaacagagatttcattaaatgcctagaagcaaaatatcttccagtctttgcccatggcctctgtgtatgcattagggcaggccttgaactcttacccagggagtttacaaccctgccttagcctttactaccagcttctgcagagcattaaggtcaacaggtggtgagagtttggagcctactccatctttcctgagcatatacacagccctactcatgcatgtggccctctagatttccaggagtatgttggaccctttcaaagcccttacagactccccagcttttcctctcaatctttagactagtgtgttgttttcttcaacagttatctgtcaggcagcagcaaattaagagattagcataaatgttttcaactcctccacccgtcatgtgccccagggaagcactaagccagttctaagttaggcaaaataaagacaatccttttgaggtggtcttccatggagtcaccagacaggtaaaccaaataattaattacaagtctttggctggatacagtggctcacacctgtaatcccggcactttgggaggctgaggcaggtggatcacaaggtcaggagattgagaccatcctggctaacacggtgaaaccctgtctctactaaaaaatacgaaaaaataggtggctgtggtggcgggcgcctgtagtcccagctactcgggaggctgaggcaggagaatggaatgaacccaggaggtggagcttgccgtgagccgagatcacactactgcactccagcctgggtgacagagcaagactccgtctcaacaaaaaaaaaaaaaaacaagtcttcatgaaagaggtccattctgctgtctttcataccaggaatgtggaatgtggactgttattttcatggctactgctaagctaggaatcaagggatagatggggactgggtaaaacaccacagagtttgctgttcttaccaagaataagctggggaagagggttgtttttgtttttcagtaaaaattccctgggctgcttcaagccgttgattaattttcaggttccgaaaaagttcagtttgacagtttttgccctttttatttgcttttatggatatgtagaacttgagttcttttttccaccagttttgctgacattgttttaaaagcactttttgtaaaacccaaatgttgtctctctcaaggctagccaataattaaaaatactgttactcccctttgattttggaaatgaattcgtattgaccaaaattcaatactagaggtctttcaagctgttttaccatttatctaaactttagaatctaatgattcctgtacattgtctagcatactggtggtcctcaattgtcataagttcaactttggaacaaatgaactttttgtgtgcaagtttccaattgtttggaaattacattgatgccccctccatcaaactgttattcgtgggacatctaggaatttcttacagcagctgacaaatatttcaagtcagtgcctggtagtactgtccaccaggcaacagcttcagtagtagagcgatctttatctataaggcagtgtttgagcaattgtttattagtgttttcctaactactcagaagaactatcaggggttatagaggtagctcagagagttgggtgcaagtagagaaatccacccggcttgcattacacatcttatttctagagaagctttcctttgaagaaggagttctaaggtttaaaaaattaccttgaatgccacttatattgcattttaattttattttagagaaatcaatggaaagtagaaaaattaaggcactgatactagtgttaagaatgttggttaaagcttctggcaattaattttttatttccttttttaattttattaaaatttaacaattttcagtttatgctgtaatccagaccaaggtttcaatctaatgaagttaatgccagtgttgctgctacctattttgtctttagtcattcagccatgcttcctacttatactgaataagctagcttaatctaacaatcaaaaaagaaagctgttgcctaagttaagaaaaacagtttgaactgttttcaaactaaatacccagtagactctctagttgttgacaggagaatgcttaattcagaattgtcctgcagtagatcattttatctcattcctgttcttctataggatagcttatttgtttgaaattgtatttaatatgttgtgatttttgtgtgcttgtttctatttttcactggatagactcaagataaaacctggtaccctgcagtgtagctatcagtttatagcagaggaaatttacattagaacttggctgtgtatttacatgtatctaacttggaggtcactctgcttactgttgatatatcagtcatattagatgagtccctaatgagataccagaaaccccggaaacatcattaggtggaacagtgtccttaatgctttattaagtgttataggtaagacaaagcctagtactatttgtggcatcaaggttaggtgtttaaagacctgtattcttctattgtcatgttgaaattgttcccttgatgtagcaatagaaaattttagattaggcttaagttaatcagcaaacaaagataaaagtctgatactatcctaaatattttgtgtttctaaataatttaacagtgatccaattagctactcctgtagaaatgtaattgataaacttttcactctcttttaaattgccatcttgaattttacctgttttttaaagctgtctcaagtcctctctaaaaaaaggcagtcatttataaatttagaaaagcttgatagcacagaaagtcacagaaaaatgtaaacatagtttaaaactgaattgtatacaagccactagaagtacttttattaagtttacaaatattagtagagtggaactcatgcatttaatatgtttgaaacttttgatcaaatactgtgctatgaaaaacattttagataattattctttaatcatgtgtgtgtaaaatgtggctttttttgacaaccaagtagcttttctgtgtgccaaactgtgactttaaaattttaaagtactcaacagagtaaacaaaccacaaataccacttaaactgtacacatttgcacatgcatttcctataaatagtacatgggtttcaagtcttcacttttgaaattcagaaatgggttttttctccttccagtagaaataaaaacttgatttattttatttatttatttattttatttttgagacggagtctcgttctgtggcccaggctatggtgcaggagggtgatctcagctcactgcaacctctgcctcctgggttcaagtgattctcctgcctcagcctgccgagtagctgggattacaggtgcctgccaccatgcccagctaatttttgtatttttagtagagatggggtttctccatgttgggcaggctggtctcgaactcctggcctcaggtgatctgtctgtctcagccttccaaagtgctggggattacaggtgtgagccaccgcatccagctaaaaacttgatttttaaaaatccaaatcgaagacagaattgtgtattttagtacatttattagcagccttgacgctataccatatggctgtttatcatttaaacagcttgtaaaagcaaacacttcaggattcatgagtggcagaaggactgagtactttgggaaataagagagaacttttgttgaggatggttgaggaagagtccaagacaataataggcagaataagcaaaaatctagagactcattgtaggcactcaagtatgtatttgttagaatgaatggctgaacttggtatattgaggaacactgagaaagccatactgactggaagatagttcctacaagaaactggtgagacatatgttacagtctagattttggtgagccttgttaaagtttgggctttatttttatacggggagaaagtttcacaggggtttggaaatgaggcttggagctgttaatggggacacagtgaggttttagggtagtggctttcaaactgtttaaatccaaactttgatgataaccctgacataactattgtttataacttccatttcagttgtattggttttatcaaaacatcttcattgatcttactgattgcttcctatgcagattaatattataaatttgaatgtacaaaggaagctttagcagtaaaatagcaacttttatctgtcttacgtattggaggttctgcataagatttaattttttttttttttgaaatggagttttgctcttgttcacggggctggagtgcaatggtgtgatctcggctcaccacaacctctgcctcccgggtttaagtgattctcctggctcagcctcccaagtagctgggattacaggcatgtgccaccatgcccggctaattttgaattttagtagagacggggtttctccatgttggtcaggctggtctcgaactcctgacctcaggtgatccgcctgcctcagcctcccaaagtgctgggattacaggcgtgagccaccgcgcccggccaagatttaattttttaaaagaaaatattttgctaagggtttggaaactcttgttttagcaagaatggattaagactgattaaaactaaaggcaaagaggaggctcttatgtttggaattctttgctaatatttacacaatataattctctccacaaatatttaatggtaccagatattagatggttataatggcaaaagtgttcaaaggatgctatcatattcatgattcatgatcaaaatgaacattataaggctatccctcttcagaattaaatacgttactcctgtggaaaacttgcttttaatgtagaagttgtcccagagcctttcttcctttctcatgtcctcttatgtccactgctgagctaacatgggtctcactgaatgattaagaaaaaacatcttaggtggggagttctgtatatagtaaatgtttaatttattggggtggtgaacgggaagtgctgctggcaagagaggatgggaagagaaatctacccaaatccttacccgctttacagaacataaacttcctattcagtagtacacaataacttaacgatcaaggcatcttaacttttctgttttcagatgaaagaactatcgtttggcttgatcaagtatttagtatttattcgttcactcaagtgcttacgtttttttgttatctcagggttttacgttagttattaaccaaaagaactagttttagttctggaagtctaaaatatataagagaaggtgaggagtaataagagaagatgaagggagactttcggaatggcctatgaacttctagtaactataccaccttaaaatagacaaattacaatgcagttatgaagatatgtatttttcagtgaagacaactaaaatgtttgcacagaattttcttttttattgagtgttagaaattctattttggagatactaccttgcacaacataaaaagaaaaagtgagtgtggaatctaggaatctacgtggctctaggaaattttttaagtgtggaaactgaaggagagcaagagaaagggagcatggcattcccctgtttgtagttcatgaggtgggtttaaattgccttttgccaatgcagctgcacactgaggattacagaattctttttaaatgtttgtagaattatttttcacttattaggtaaaacgtgtattttttgattttctccaatttcagctttctcatgttgctatgctcaattttgtataccatatatagttttgttaaattgacaaagtggtgttttttgttcttctttttcccattggttaaaatttaaagagaaagtggaagctagaaatttatctaaaaaatgtaactttccctgtaattattaaagtatcaatctaaatttgaattttctttgtgcataatcttttttcaagctatttaccatgttgacaaacttgctttcctgtggcaaatacactagcaatacgttataaatatgtaactttcaacctatttacagttgatgcttttttagccctttggatttaaaatacaagcactgaagaggtgaggaagtaccactgctgcctcagcattatttcgaaattctgtttataaactatacaatttccaaggtcatgaatccagcacctttccaggtactaactattgggacaaagatagaatttgattttatttatttacctattgactgaagtctaacttaaatcttgcacctagtaagatcttagaaataacgtgtgtactctgacctgtaaactaatcctagtattctgtgtgtatattctttctcatttgggctcttaaaaggaaaagtaacgtacatctgatgatcattagcactgagctttttcagcaaaaagtatatgtttataaagaagtataggataatttagtaatttaataatgtgacaacatttgcgtgtgttttttttttttgagaaatacaaattgtgagaaacagaaaagtaaaagaagcagcagcagaaatatcactataggatcaaaagattgcaggaaccaaaactccaaaattattgggcataatgtactaaaaacagggcagtggaggaaagggacagtccagactagctctgagggtccaaagaaagtattaaatattgttactggagtgatttgctctgctatttgggcttgggaattaagtgaaattgttgatatactagacagatacttcccacccatttttctcttgataatcagggttcattttttctattttctatttctctggatgctccatttcttaatattaatattaatattaagctctcagtctttatgctaaaaattggttatttaaaacaatttaaatcaacttcagtctaattggcttaagttcaaatccattttaagatcgatattgtgtcctttaaaaattttatttaaaagatatttaaactgatgagaggatactacccattccactgataaactattactgtaagtttgtctattgagggctagttatttggtttaaaaatgctgagattatggaaagtggattggaatattttggagcaatattaaaaacagtatctgtaacaatttaataaacttataaattcctctttctctgttgatctatcttgaaaagacactctatgtctctaggcattccttctctgtggtgtgattggtagacagggagtaaacaacttactgtaaatgggcaccatgccagttggcttcaggcagcatcaagcttgtgactcacagtcagggttaggaaaatgccttttaacttgtttgtctctgcctcttttaaacattaaaggcacaactgtactaattattaagtatttcataaggtcttttagggcttataagatcttttaggaatggcctggaagttattagtactgtttcattgaatctgaatacctttaacatgataatgagaagtttttaaagggtggttttatagttaaacggaatttctcaaattggcttgctccttatgttgatttatttaggatcacatttgggagtttctctgccctactttcaatgtatttaatttactgaccatcactatttggggggaaaatgttatatgatatttagaaaccaagagttttggagtttttcccccattagatgtatttatttatttatttattattttttaaagacagggtcttgctctgtcacccaggctggagcacagtggcatgatcctagctcactgtattcttgaactcctgggctcagactgtcctcccacctcagcccaagtggctaagtatcaagtaagaatcacctggcaaattccaaggctgtataccagatttcctaaattagaattttggggttgggtatctgaattttagtaaagccctccaaatgtttctggtattgcttctaagaacaattgataacataatagctgtggccattataggggtattctgtcatatttagatataggcataccttgttttattgtacttcccaaatattgcgtgtttattttgttttgtttcacttacaaattgaaggtttgtggcaaccctatattaagcgagtctgtcagtgccatttttccaacagcttgtgctcattttgtgtctctgtgtcacattttggtaattctctcaatatatcaaactttttcatcatttttgtatctgttacgaccagtgatcagtgatctttgattttttctttttttttttttttttgagacggacttttgctctgtcacccaggctggagtgcagtggttcaatcttggctcacagcaacctctgcctcccaggttcaagcaatcctcctgcctcagcctccccagtagccgggcctacaggcgtgtgccaccacgcctggctaatttttgtatttttagtagagatggggattccccatgttggccaggctggtctcgaactcctgacctcaggtgatccgctcaccttggcctcccaaagtgctgggattaccgtgccagcctgatgttactattttaattgttttcaggcaccataaacctcacctgtataaggcaccgtacttaattggtaaatattgcgcatgatctgactgctcttccaactggccattccctgtctgtctccctcttcctgggactctcaaatccctgagagacaataatattaaaattaagctaattaataaccctacagtggcctctaagtgttgaagtgaaagagttgcatgtctctcactttaaataaaaagctagaagtggctaaacttagtgaggaaggcacatcaaaagccaagacaggccaaaagcaaggactcttgtactaaacagctaaattgtgaatgcaaaggaaaagctcttgaaggaaataactagtgctactccagcaaacatgtgaatgatcagaaagtgaaacagccttcttgctgatacgaagaaagttttagtggtctggacagaagatcaaaccattcacaacattcctttaagccaaagcttaactctcttcaattctatgaaggctgtgagaggtgagaaagctgcagaagaaaaattggaagctagcagaggtcggttgatgaggtttagggaaagaagccagcgctgtaacataaaagtgtaaggtgaagcagcaagtgctgatacagaaactgcagcaagttatgtagaagatctagctaagattactaaataatagattttccatgtagatgaaaaagccttttgttggaagaagatgccatctaggactttcatagctagaaaggagtcaatgtctggcttcagaggacaggctgacattcttgttaggggctaatgtagttggtgactttaagttgaagccaggtctcatttaccactccaaaaatccgaagacccttaagacttatgcttaatctactctgcttgtactctagaaatgaaacaacaaagcctggatgacagcacatctgtttatagtatgcttcactgaatattttaaggccactgtaaagacctgttcaactgctcagaaaaaaatgattactttcaaaatattgctgttcattgacagtgcacctgggctcacccaagagctctaatggaattgtacaacaagatggatgttgttctcatgcctgccaacacatcatccatttgtagcccatgaatcagggagtgatttcaagtttcaaatcagtacattttgtaaggctatagctgctatagacagtgattgctctggtggacctgggcaaagtaaatcaaaaaccttctgaaaaggattggccattctagatgctattaagaatttgtgattcgcaggaggaggtcaaaggatcaacattagtagcagtttgaaagaagttgattccaacagttatagatgaatttgaggggttcaacacttcagtttaggaagtcactgcagatgtggtagaaacagcaagagaactagaattagaagtggagcccgaaaatgtgacggaattgctgcaatctcatgagaaaacgtgaatggatgaggagttgcttcttatggacaaatgagcaaataaatttttttcttgagatggaatctactcctggtgaagattctgtgaaccttgttgaaataacaacaaaggatttagagtattacataaacttaattggtaaagcagcagcatggtttgagtggattcattccagttttgaaagagtttctactgtgggtaaaatgctatcaaacagcatctcgtgctacaaagaaatcttttatgaaaagaaaagtgaaacttcattgttgtctactttaagaaattgccacagccaccccaccttcagcaaccacctctctgatcagtcagcaggcatcaacactgaagcaagaccctccacaaggaaaaagattacaactcactgaaagttcaaatgattgttagcatttttaagcaatattttaagattaaggtaaatacatttttaaagacacaatgctattgcacacttaatagactacagtatagtataaatataacttttatatgtagtgggaaaccaaaaaattcgtctgacttgctttgttgcaatattcactttattgtggtctagaaccgaacctgaaatatctcagaggtatgcctgtattaatattattttgcaagtaaaaaacccagcatataaaaaaaacgtagaatatgttgagagttcagtaatatggatgaaaatgtttttctctaactgaagaacatgataaattataattagggaaggatataaaccaagaaaatatgtctgagatagccaattcttgcagttcataatatgaaaactcattataccaatctcagtaagaatacttttaatagctgttatttctttgggatatagaatttataaagtacacagtaatcttcttatgatcaatcctaggatcactttacaaccacttaccccatattacaatgtagtaccaagacaagcagaccaaattatagaaggacaaagtttttgctaagcatattttgtcatcagcataccgcattgtgtgtgcatgcatgtgtgtgtttgtgcatgtgtgtgattgtataaaatattagaaagccaccccagaaaagttaaatgactaggaatgttgtgaagggattaagctacccctaaaattatataacaaaactctcttcatctattattaggtcatctttagaacatcttctcttaaatttgttataggtctctctcatctgtttggattaaaattggtctgaaagcctaaaatggctttttacctatataattatttcccaactagcttgtagtataggtgcaaagctatcacacttgctaggttagtgaagtatgtaaaaactaccatctttcaattaggaaccatcggatagcttctacaggattgctggggagaacctttataaagaaagttatatctttataaattttttgtcattttacttagctgagaatataaaataagttagctaataatagagtagaaatgttttctgtaacagattaatattgatcaaatgtgttattaaatgctaaaacaccattttttttctctgtaagccatgtgtttcatgccacaacacaaaagggacaattgtctgtgttttatgacagttctgttctgtcagatgctgtttgttcattttggtgaataaatgaagagagccctggacacatctttttttcctcaacaaaagaggaaaattattcttgtctgtatgtctataatcctgactctttgaatggctttaatttttttaaagtcagcatttttttataaagataggtgtttggaatgtgggcgatatggctggacagttagattgggaccaaataatggaaggctttgaacatcatgctaagaggtttgggttttactctgaaggcagtagagaaccattatgtttttaagccaggattgacttgttctaagctgtaccttagaaatattactctggcagttgtacataggatgagctgtatgttgctttgttttgtttggggagacagttctcgaagagagactacatacgaaggcagttatatgagtcattactaaaggtctggcaagaagtagtaaaagcattaactggagtggtagcagtagggaaggaaataaaaggatagatgtgggagtcatttggaaagtatgaggcaattcattgaccttacagaatcactggttttctgcttccactccattcacattgacctttccaaggttatcagtgacctgcttgtccttaaattcagtgggcactttccagtaacctactgttggcaccagccctgtgctagacaacaggatcctgtttgtaaaggcatctgccagtggtttctgtgacacaattctgtttctagttttcctccttctacttctctagcctcttggcaagttcttctttcagagtttctcagagctttgtgctaggccctcttctcattttctccttctctaagtgatcccatccttttctgttgcttcagttaccatttgtccttatgcaaaggacagccatatgctactgtatctccagctcagatgtatctctttgcctcctgacccatatttccaactatctaactgggtatcttttcttggatgagttataggtctctcaaacacaacatgtccagaataattcattgacttattctaaggcctgcttcctctttctcctgtagtccctatctcaggaaatatatggtgctatcaaccccaaagcagaaatctggacataatccctaactacccttttcccctctctgtgcacataatttcagtcattaggcctcatagattggactaaataaatacctcgcaaacccttctacttatattcttaactgctcctaccttaagccaggctaccataattttgtagctggatgactgcatcatcatcttgactggctcccttgtcatcttcaatctatattctatactgcagctagagctttcaaacataaacatgtgatcagattagtcccctctttagaacaccctagggttctcactgtcctgagtacagtctaagggtttaccatggcttacagggtcttttatgatttggtgagctttttattgtataacctttctaaactgcctttacttccctctttcttggctctgtgtctttgcataatgctgttccctatacttcacctcacgtctaaccttcatctccttttcacttctcctcttcctccaaaatccagctgaatatcacattgtcatgcaggcccattcttgatctcccacgtttgggttagatatccctcttcagtaccatcaccgcaccaggtgtgtcccctatcctagcatttgcctcattgtattacaactactgtgtactcgtctctacagctcctgctagtctaaaagttttgggagagcaaaggttcatgtttgtgtttttcactgtggtataccccagtgcctagtatatgataagctctcaaaatatttgttagatgtatgaagaaatgagaaagagaacaggaagagggtaagtttcaagactaggaaacaaggctatgaaagctgcaggaaagcagcaggttaaaacctagaagaagagtttgttttaggaaatactgtgttttaaaccactataactgaagcaaaaacccaaggcctgggtgtggatagagtccactatctgataacagtggatactgatgcatggcagagttggagaggaagagagccagattccaaaacagaaggggtaaagtcttctaagaagatagattatagtaagaaggattaggggatagaaatatgagcctgttccactcatagatctcaaacatgaaatgatgagtcatcatgaagagagtaggcaattgtccagtgaagaaggggatgctaacccttcttaaccttgaatctctcaggtagaagcagttagagaaggaacagccatcatcagatagtgttgtaaggaaaatgatatccttggggaaacctgcattttggtaaagcaaagcaactaagaaagaatatactaccactgtttaacaatcgccacaaaaagacagtaggatcatctttgacccccctcatcctttctcaggaacttggaggactaagaagagagaaatctgtagaagaggcttctctctctgatcctccctccacttcagttttaccacatgtaatgcaacaataattaagaatttgtgtaaaatttcaccaggttggcatgcatggagagaaaaattattcagatgttttcctttgtcaataatacaaggagcatttgtagggaaaaatatttacaaatacagtaagacctattctctttctatatttatgggaaaattttaagttgtgcccttgtttcatgtgtgtttctatttaaagataccatacttaatatatattgttgattcattaacattgaactcatggctaacagcactataaatcatgtctgatcaaaacttatgatacatgtactttcttcgtaaggtacatcatagtcttctcgtacatgggaactctaggtagtacttcaggactatgcatagaggccattttaaacagcaaaattcccaacaaaaagcacaaaactcaaaaaatgtgccactaaatttaccatgaaaaggacacttgtttacagtttgagagctaaaacaagaaggtggcgtgtcacttcgtttgacttcagctgggaacatgcatatcagtcgactcaaattttttgctattctgtgcttatccacgaatcgataggaaagcaagtgtggatttgggggttacaaataaaatgtagcaaatgtgtaaacttgcagatgtggaatctacaagtagttagaatcaactatgttagtctgatcattaaatcagttttttaaagtactattgtaacaccttataacctgccccattcactgagtgttgtagtttatagtttcattgggcattttcagtagttttatctgaagtcacatttcaaattttgtaattgaagctccaaagtatgctaccggaaacacgagctgatgctgtgagacaaaatcaacaggtaatccaccatcacaactgtgggctagaatgctcaagaaaccttggaggcccagagagctgagatgaatactgaagaatcataggcaggtttactctgtcaagctgcctgtattttgagggtgtagtcctcaaaccaaaaagacaccaaatgaacaaactcagatggcctcactggggaacagagattgaaagctgacactggaatgtgtacttaaaaaaatgagagcccgttttggaaaggcagactgggcacagaatgtggagagctatatttgctaactgaagaaatttagactttatcctctacaaaacaaagctattggtttttgaaggttgcataaaagctgcattttagcagcatatattttggtagagctgttacctgcctgaaaacatcaatgtcatttcacacaaatgatacttatcccttggtgtttgatctaaatttctacaatgagaatgtgattttatagtctttactggggaaggaagtaggtttttcaggccgaaattcttgtgtagcaaaaattaacacttaagttagcccttggcaatctccagttctataatggtaaaatggatttcccagaaagtcactctctatccctttgaatagacattagaaataacatgtactttaagtgggatttacagaggaagggggcctttaattctttactagtgtgatgccctgtaaaaaaataactaacattagagttgaggcctagaaatagcagcactgggttaaagtctgttttcaagtgcaagtttttctttttattcgtgtgtgtgtgtgtctgtgtgtgtttcacatagaaggaggaaatgccaatttcagttcttacaaatattaatgactgcaacttataaaaatgttacagactatattcttcccttttgtaacagatgagaagattttgaaatttagtctctactttttagtttggtaagacaatttgaataaactgcaataattgcaaaagaattctgaatatttgaacatttgacattttctatgtcaaatatacatttcttgtactatataaacattctagaaaagagagacaggcagggaggaaagtgctcattaaaaagagcttcaccctctctgaaaagggatttcctttacagtgctgtgtactaaagcctgtgttgtaaatcagaaagcactgagcacacatgttgctgctttggtagcatcagaagtcgattttcattagccttataccattcactatttctgccaagcaatcttaaattataaaagaatcttatttgattttgtgattctcttgttttctgctcataaagaaaatatcctaaattgaacaatggcatgctacgtttttagtttttaagacagctaatgtgtaaaaagacatttaaagtatagttgtgttaagtttttgaagtttacagttgtttcaattttgctgctatactttgttaacatattttaggaatatttcattttagtcacaactaggatataaacattattttggtggcgatctccttgtaatcacgacgtcaaccaaatttgggaaattttgatttgttagatttataaattttacagtaacacaaaagtctaatttcctatatattttcaaggcccctatacctttgtcaaaataaagtatcaatgaaaaatgaaaaaatcataaactatgttcaggccaaactgatactgactttgttaaaaggctagatagaaatctgttttcctcttctgttacatctcctcttctggagaccactctgtgtggactgaaggtttgagatcctaggacctaggctagaacagattaggagattgtgctgtatgttaagtggcagataccatggaattctaagcctgttacgaaggaggagaagaagaggcacaatgaccctgacacagcccctgggttgaccacagcagatatctcacttgagcaagtagatatcatctcaattgcttgctgattatctctaacttgtcagtaacttactttgataacctagatttaggagtctgacagcatgcagtgtatgcctcataataatctgctgtttatgaaagtcataacattgtatgtttagcataatggtgaagagcctgccatctggaatggtctacttatttgggatccacatacagtaagctctcacttaacatcatcagtaggttcttggaaactgtgaccttaagcaaaacaacctctaatgaaaccaattttaccacaggctaattgatataaacaagagttaagttcctgtggcatatttctggtcacaaaaacatcactaaacttctaaataaagacccaaaacacttataatattaaccactgaaataaatgtgagctatatatatacatttaagaataataaaaacaaaaaataattatttacccaatttttggtgaaccagtgagtgatagtgatcatagtgatggtggatgaaatcaaggaataaatatttgcaaagtgaaaattgtaagaagcaccccctgtcaccacatagctcagaaataataattagggcaggcttgctgagcatttttaaactgcactgtttattgtcatgcatttgaatgattatcgcagactttatgaattttcattttatattaatttgtaggccaggcacagtggctcacgtctgtaatcccggcactttgggaggccaaggcaggcgggtcactggaggtcaggagttcaacaccagcctgaccaacatggggaatccccatctctactaaaaatacaaaaattagccaggtgtggtggtacacacctgtaatcccagctatttgggaggctgaggcaggagaattgcttgaacctgggaggtggaggttgcagtaagccgagattgtgcccctgcactccggcctggtgacagagctagactctgtctcaaaaaacaataataataatttgtattcattcattttccaatgtgttcattccagttcagggtccagggggcctgcagcttatactcatagctcagagcaactgaccctatagacaggacgccaccccattgtagggtgcactcaaatgcacactcacactcaaactgggacccttcagacatgccagttaccgtatcacacacagcttcgggatgtgggaggaaagcgaagtatctggagaaaaactacacagacatgggaagaacgagccaactctacacagacagtggccctggacagagctgggcaggcatcagttttttttcttttttttgtggggggtgagggtggggcatggagtctcactctgtcacccaggctggattgcagtgcagtggtgtgatctcagctcactacaacctccacctcccgggttcaagagtttctcctgcctcagcctcccaagtagctgggattacaggcgcccgccaccacacctggctaatttttgtatttttagtagagacaaggtttcaccatgttggccaagctggtctggaactcctgacctcaggtgatccacccgccttggcctcccaaagtgatgggattacaggcgtgagctaccgcgcccagtcagcatcattttttttttctcatcaacgttaaaacaatgttgaacaaaacattattcaaagacctgccgtatggctattttctagttgtgtgactttctttgggaaagttagcaaccctttctgagcttaaatgtcctcattcataaaatggggctagtaataatgcataaggtttttgtaagaattagaattaataaagtacttagaccataataactaattagtattagttgttgtctttgctattattttgatgtggtggttgtttggtttcacctgtgtactatcaggacatgctgaaataaaatttaagaattggctttataatattagaaaagcaaacttttgtacgatatgggtatgaaaaattgttgggagtctactttttctctcttacctaatttgtcttagtctttttaaagcttagattttccaaatgagccatagcaaaatataatgtttaaaaatgtttaaattctaagcactatgtcatagttaaataacttaaaggtgctacatcttatacagtccaaaaggaacataattagtaaaattctacaatttagaaaaaaaaatagctgacagtgactgatttataaaagtaaaatatcttttgttaatactaatattctttttataaattaattgatgacaaaaaattgagtgaatgagatttgcagttcatttatctatgatgctggtttatttaatctctataatttgctgtatttgaaagagcatagtgatagaggtcatgataaaatctaggcccagtgccacaactaaatccctgtaggaactctcaaggttttgatttcatctctgaatgggaataacaccttccaagaatattatgaagattaaaaagttacgtatcataaatacacacagagtaacaatactgggaatattgcaacttgtaagaaagaggaagcatatggcatattctgatggttagggatatggactctgtagctgggatgcctgaaagagaactctgactccactaatggctagttatatgaaattgtgcagataatttaacttctctgagtttgcatttttctttgtctatataatggggataataatagtacctacctcacacatagtgttaatttctattagtggttctcattaagatagtattgttgttcatccctggttgttagccatcatgtatctgagttagagagtcattgattttagaaagtcccgaggagactatcaggtcaagcaacctgcctcctgctagacaattagctttatccatgagttaccaaagagggagccgaaacccagggaagctgaaagagctgttgattgtcaccctgtgagttggtgatagaaagatatctggaatcccagtagttgcccatttcctagttctgggctctgcattgcactagaatactgtgccattctaaatatgaaaaggcagtatgaccattgtgcttgtcactttccattccctagatgctatcttatatttgtccttatgaaatttaacctgtgactttcagatcacttagaaccttggttggacagtgttttctagtgttatttagtatatttttttgtcatcttctgttgtctttgggttcccctaaaagagctatactctgggtgccaggaaacttcacacatgactgtcttctcttcctcgacttccctctctacttacctttccagctcgtagcaaatcagaagacttctctgacacctctctatgtctaaaggtcctttgatattctcacatggcggcatgaatcacagtgtattttaactggccttttccttgtatgtctcctacaatgagctgttgaagcttcatgaaaacacaatctgttttactcagggcagttataattccaattacaaagcacatttcctggctcctggctaggaactcgatcatttttcgatgcttccttgctcaggactttctgattccttcttaaaacattttggggcatctccttctcctggtttttggaaacatattctcatactgctatgaaggtttttactgacatttccaacttctcttaaattgattcagcaaatgtttttccataataaatgtcattgatatgtcatcaatatggagagcaacaacagaatgcattgagtaaactcctcccctggaggtctgagaatctagattccagttctcacagagccaccaccttggtgaccttggacagtagaccttctaagcctcagtttccttatcccttaagtggggatattaatagaacccattctcagagatgttgccaagattaaaataaccaagataattcctgtagatgatttggcatagtgcctgccacgtactaagcaagagttagcctccgtcattatagtatgatcataaaaaatgaacagactaaacgaagtaaccagaaggaaagaaattttaattcttaaaatgtaatagtttcttggtttttttttttctgtgaaacacctgcatggcacctttttgttattcatactgttttgactgtggctgtcgtagattcttgttgaaagtctgagagactgagacttgtcattttgaacatggcatcagtggaacagcttatgattcaataattgcatcatcctggacaagcaccagtagaagtgagtcaggacatgtgataaaaagacattcattttgcccctcctccctctctgtattttctttgctataaaattattgatgttaagcccatagtactaatatttcagttcaattcataataaaatttgagggcatttgaatatattatctgttgtaaattataattttatatttgaccacagagtatttgaagtgggtcttttctttccccaaaattctattttaataactaaaaaatattcttaggagaagtattatttaagaacaggtttatattaaataacatcatttcactttcaactttctggtggtcaaaaaatatgctaatactaattaggatatgatacacatgttctgttagaacagttttggcagttagaagacttctcttcttgtgtttgaaagggatgttacttggggtagttatgagccatgtatccagatgtcctgaaaggaccagtggtagatgtatttctatttttgtcttttcttttttctttctggcattctagttgctgagtgactgacttttgttttcagctcttctcacaatcaccattgttctaataactttgcttaaatagaatgtctccttttgctataagccatggggccatttaccgttaattttttaaagtactgaaatgagaacctcataaattaaagaacactcctgattctgagttagcagatcctactaagccttttgcagatggaaatttcctttaaattggtttgttttcctttaacattccattatcctattgttcattctttggagctgtgatttgtttaatatatttcaggcttcttaataaatcaagtcatgtaagttattatttggatcatttcgaaactacaacagcttatcaaacctctgaaagaagaattttgtgtttgcccacagactgaagaactgattcagttttattggctgagctaccttcattattcatatttaattcctggtactgagggtgggaggagggagaggagcagaaaagatacaactattgggtactgggcctaatatctgggtgatgaaataatatgtacaacaagcccccgtgacatgtgtttacctatttaacgaaccctcacatgtatccccaagcctaaaagtttaaaaatatatatttggtaaatcaattgatgtgttttaaaaaatatcgccttttggccgggtgtggtggcccatgtctgtaaccccagcactttgggaggccaagccgggcggatcacgaggtcaggagttcaagaccagcctggccaacatggtgaaaccctgtctctactaaaaatacaaaaaatagctgggcgtggtggcgcgcacctgtaatcccagctactcgggaggctgaggcaggggaatctcttcaacccaggaggcggaggttgcagtgagccaagattgtgccattggactccagcctgggcgacagagcgagactctgtctcaaaaaaaaaaaaaaaaaaaaaaatcatctttaaagagataactaacccttccccagaaggcagggccaaagtctaaggttcttccaggtcctttgtattccctataaattttagagtcagcctgtcaatttctatacacacacaaaaaaagcctgctgggattatgattggtattgcattgaaattaaatcaatttgggtataagagacttcaatttggggattgagtctatattgagtcttccaatccaggaacactgtatatctctccatttagtcagatatttagtttatttcaacaatattttcagatctttagttcctttcagcaatattttctcatttttcctgtaaagctcttgcacatcttttgtcccatatctattgtgtatatgtgttttgctagttattaaattatattaatataaattttattttccaattgtttgtcgcatatatagaatgttttaaaaatattgtgtcctgtgaccatgctaaattaactaattctagtcattatgtcttcattatctttctcttgaattttcattgtcttccccttctgggactccattcatatgtaaggccatttgatactgtctctcaggtccatgaagttctgttaatttttcttcattcttctttttctctgtgttcttcaactgaatgaatgccattaataatttggtatgtaatggctcacttaaacttccttttgtttttaagatatttctactctcagctgtgtctggaatcctttagtccggagccccaccaaccctcagcctagaaggaaggaggagaaggatagggtgaaaggaaggggagagcttctagcttcaggacagagatcagaacaaacaacagagcagtcatcttggataaggaaacttccctcaaacctattacttatatcctcagaaataagaaaaataatgcatttatcaaattaaaggattttgaaaaagggaacattcagagaataaaactaaactcttgaaagttaaaaggatgataacataaatgaaaagctcagttgaaggattgaaagataaaagtaagaaaatatcccagaaataagagcaaaaagacagcaatgtaaaataggggagaagataagagaattagagaaccagcttaggagttctagaaagagaaaatgtagacaacaaaaggtaagaaatcatcaaagactggagtaggggaggtcatgctatctgtttctttttctattttttattttgagttacatttttttttactgtgaaacaagcatatgtacatgagaatgaacaaaacaaatatgcagtcatgtattgcttaacaacagagataggttctgagaaatgcatcattaggcgatgtcatcattgtgcagacatcatagagtgaacttacacaaatctgaatggtatgtcctacagtacacctggaccatatggtatagctgttgcttccaggccacaaacttacagcatgttactgtactgaacactgcaggcacctctaatacatcggtaagtatttatgtatctaaacatagaaaaggtacaataaaaatacaatataaaagaggaaaaaaatagtacacctgtataggtgcttactgtgaatagggcttccaggattggaagttgctgtgagtcattgagtagtgagtgaatgtgaaggcctaggacatttattatatgaagtctactgtagtgtaaactctgtagacttaggctacactaaatttatagaaaaattttcttcaataataaattaaccttagcctactgtaacttttttactttgtaaacttttaatttttttaacattttgactcctttttagtaacacttagcttaaaacacacacattgtacagctgtaaagaaaattttatgtccttcttctgtaagcttttttccatttttaagatgtttttatttttaaaactgttactaaaaactaatacacaaacacacacattaacctaggcctatacaaagtcagtgtcatcagtgttcaaccttcacatgttatcccactggaaggccttcaggggcaataacaaacacagagctgtcgttttctgtgataacagtgcctttttctgatatacctactgaaagacctggctgagagtgtttgacagttaacaaaaaaaaaaaaggacaagaagtacactctaaaataatgaaaaaagtataatacagtaaatacataaaccaccaacatagtcatttattatcattatcgagtattatgtactgtacacagttgtatttgctgtacttttctataactggtagcacggtaggtttgtttataccagcatcaccacaaacataagcatggtgttgtattacaatgcacagctgcagctaagtgataggactttttcagctccattataattttatgggaccatcactataaatgctgtccatcattgactgaaatttatgtcgtgcatgaccatacatacaatttaatgaaaaataataataataaagctagcagtgtgtaattaccaaccagggcaagaaatagaatattgccaataccttggaggcctccagtatgaccatataagtttacaaatcctattttgttcctcctccccagaggtaaccactgccctgacaaatgtgatcgttgttttcttgtttttcttactacctatataaacatccttaaacaatataactcagtttgtatattttgaattccatgttaatagaatatcatatgtatatgaattttatgtgaatagaatattatatatgtcattttgcatcttgcttttttcattcaacattgtaggattcattcatgttgtagtgtacagctgtcgtttattcattgctgtatagaattatatcctcagagataagatatatggatgtttataaatcattccactattatgaacatttgactagtttgtagtttttatttaaccaaaaaaatgctgctgccaacattcttacacattttactgtatatgcacattaatttatttacaagtataaatttctttttgaatacatatctattgatggagttgctacatcataggacattcttgtctttgactttactggataataccaaactgtcttccaaaatgattacatccttaaactcaggacacatcttattgtcaaatgtttaatttttgtcagtctgatgggtatgtaagttattttattgtcgttttaatttgcatttccctgattactaattaagctgagtaacttttcatatgtttattggccatttggagttcctgtattgtaaagtataagtttttttgtccatttttctagttttctgtccttttagttgaaatccaaatttgcctaaatctgttattctctgagcacaagtaacttgggatgctttcctttagatttagcctaattctttatcattttgtcagcttgatggtgcttttaaggagatatatatgtgtgtgtgcgcacacatgtgcgtgtgtgtatatatatatatgtatatgtatgtatgtattttttgagacagggtctcactctgtcacccaggctggagtgcagcggcacagtcttggctcactgcagcctccacctcctgggttcaagcttttccctgtctcagcaacccgagtagctaggattacaggtatgccaccatacccgctaatttttgtatttaatagaaacagggtttcgccatgttgacaggctggacttgaactcctcacttgaactcctcacgtcaagtgatctgcctgctttagcctcccaaagtgctgggattacaggcatgagctaccgcgcctggcctggatattttttaaaaatattttttatctagcactttggtttttggcaggcaggttggcactcatagtctgacctaccatttctataaaaagaaacctgtaaatgttcttaaacagactttgaaccagtcttcctgattttgaacccctacctttacccccagtttttgagcctttcagaattttttttcataataattaggttgcttcttagctttccccactggtgacttaacagatcttaggaagccaacaatccttgtccatctgctttctgtcttgtgaactgttgctggtattgtctcttctctttattcttagaggtgtatgcttttaaaaacatatactgggtttgagagggagctgaaataaaagcatgtgttaaatataccatctttaaccagaactacatttgactggtcattttattttcaagctcacatacacttcaaacagagatatggctaaaggaattatcatgtgaacaacagccagggctctgaacatcacagattatatcatcatacttgaaatatttgaaattttgattcaaaatgagagctttatagctatgtcctcaatggactaagtgtttaagtacttaacatccaaaacattcttactaatcaagagaagacaaacaccccaacagagaaataggcaaattttatcaatagccagttcaccagatttgttttctgttagaagcgaatatggggaaatacatgtgtccatgttttgcctacttttcctggagcaggtaaggagaggcagtttaaggatccatgtgataaaccctaaagttgtccatcggctttccagtcccttctaggaatttaacttagggaaataatcagacatttgcaaaggtgtgtacagtggtatttataatagtgaaaaaccaaagaatgaccaataacgggagaatggaagttacagccaaatactttacaactactaaagaatcatgtaaaatatctattgacataggagttttatcaaaatgtgaagtatacagatgaatagtaccacacataaaaagcaaggtgcaaattagccatttatattgttatccccaaaataaatagatgcagtttttttaaaagatgcaggctatatatggaagtgtttgctggttttctgtcaaaagaatggcgactttattttctaatttaaactttttgctgttttctaaattgtctaaatagttatagtttttataatgtaaaagtatcttccaatttagcttcatttgacaaattaccttttcattctatctagctatgtaattctaaatgaatttacagcagtaatcttagagcagatgaatttacaacaataatcttagagtagactacggattagatgtaaaaacatgagttgggctttatggttacagagagttttcctcagtgtggggatcatagctgtattgagtttattcagttttcctttcccacatgaatgaaaaatggggccagcctacaactggaagggcctcggcatgtaccactgtactgtgtatgatgtgatttcttgatgctagtagggagagaatcaaattgcctcctattcaaaccaagacccacaaatagcgtcaaccagtcatttcagctactccctgcagtgtcaagaaggtgtgaacccctcatgttctctattgcatacccttgtctaattcagtgtttcttcttcttttcaggttttggctttatgctacatttcagaaatcataataaccttttctggtattattttattctttttcgcactgtgagaaaaattaaactttcaagtggatgcttcttataaactatttatacccttttgctcccttttgggaggcagggacagggacagagttcctcctcaggctaactaagaaaacttactgcttccaatgtaatttaaaagatctccctctttctattgctctctgtactcttaattcttttttttttttttcacagcagagacaagtgaacatttatttttatgcctttcttcctatgtgtatttcaagtctttatcaaaacaaggccccaggactctccagattcaattatgtccttgggcttggtcgactgctgtaggagtctcagggagccttctacaaatgctagagtgactcatttaccaacattaaaccctaggatacatgcaacaaagcaggactccttcctccatggaatgtgccgatttcagatgacacagcacccaatgtagaaaacgctggaatttttccttggaactagactgtgatgagaggtgcttgacatgaacataagctactgtcttttctttttttttgagacagagtttcgcttgttgcccaggctggagtgcaatggcgtgatctcagctcactgcaacttccacctcccaggttcaagcgattctcctgcctcagcctcctgagtagctgggattacaggcacgtgccaccatgcccggctaatttttgtatttttagtagagatggcatttctccatgttggtcaggctggtctcgaactcccaacctcaggtgatctgcctgcctcagcctcccaaagtgttgggattacaggcatgagccaccacgaccggccagctactgtcttttctttgacccttcctttccagtttttgaagataaagcaggaaataatcttctctgaagatacttgataaaaattcccaaaacaacaaaacgcatgcttccacttcactgataaaaaatttaccgcagtttgtcacctaagagtatgacaacagcaataaaaagtaatttcaaaaagttaagatttcttcagcaaaatagatgattcacatcttcaagtcctttttgaaatcagttattaatattattctttccccatttccatctgaatgactgcagcaatagttttttgtttgtttgtttgtttgtttgtttgttttttgagatggagtctcgctctgtcgcccagctggagtgcactggcgcaatcttggctcactgcagtctctgcctcctgggttcaagcgattttcctgccttagcctctcgagtagctgggactacaggcacgtgccaccacacccagctcatttttgtatttttagtagagacagggtttcaccatgttggccaggatggtctcaatctcctgacctcatggtctgcccgccttggcctcccaaagtgctgggattacaggcgtgagccaccgcgcccggccagcaatacagtttttagttactcgacatctttaagcctataactcttaggctatgcatagccccatgtcctaatcaggcattcactgatcccagcaggtctccatctatttgtaccagcctcctctttcctcccaatctcaaggttactcttaaatactagtaaatgcaaaaagaacttgtaaagtggcaaggcatggcctatcaaaagtcagcccaagggcagttttcagccctgcctcacctgggtctagttcagctgacggatgagctgattgatgcgttcaccccgatagccaggtgtgcccatctccttgaggaagcccactctatttttggtagcatgatgggccactgagaggtggaaagggcgcaagaaccatgagatctcctggaaatgcttccctgggaaggcaatttcatgaatgaggtcttccaagcaaatgaagccaaacttccccaggtgctcctcaatcactgtgttgtctgtcagagggatggtcttattcttgaccttggcttgtccacgtttcaaaatgagttctcggacagacttcagatttggaaatccccaggtcacataaggttccactatatgcagcatttttagattctagggggtaacttttacaaagataccactaaaaattttctttaggcgaagtcttgcagtggttctctgcacccgtaaactcacgccatcaatcctttcgatgcgtacaacaaaggccaaggaatgtttatctggcaattccaaggcatgaggtttcacttctagtcgtctgagacgcaccttgtcacgtttctgccgccaggaatcatgtaggaatgattccagtcgcttaaacctgagcccttttcctttcttctgtcttgctactgccatctttctagtggtgcagctactcaattctttttttaattataatttttattttaagttccagggtacatgtgcaggatgtgcaggttacataggtaaacatgtggccatggtggtttgctgtacctatcaactcatcaggtattaagcccggcatgcgttagctatttttcctaatgctgtcccgcccccccacccaacgggccccagttacactcttaatccttatagctcagatgttatgatccacagtgtggttcttacagaaagttatggattaaaaaaaaaaaaaaacactcaaagtgcccgaactttcttaaaataatcctggtacagctaaactcatgcactgactgtccacctaatatttaacagtctgtgttgtgatatattgttttaatgttctgaatgcttgtcagctttcagtattgaagatgtgaatcatttatcagcaatgacacatttagtctaaggttgtcagctatttatgctacaaattaatgacttgtccttaaaatatcaattttgtgattcatgttttggcaggtggttagatgttttgtgttctaattttaaactatggataaaggttttgtcataatcattgttttattggttccttttctcccctgcccactccccaaaaaaccctgcaattcttttttgttaaacttttattttaggttcagaggtacatgtgcaggtttgttatataggcaaattttgtgccacaggggtttgctgtacagattatttcatcacccaggaaataaacacagtacttgatggataggtttttagtcttcattctcttcccaccctcaagtaggccccagtgtctgtccttcccttctttgtgtccctgtgtactcaatgtttagttcctagttataactgagaagaacatgtggtatttggttttctattcctgtgttagtttgcttaggataatggctgccagctccatccatgttgccgcaaaggacatgatttcattctttttatcgctgtgtagaattccatggtgtatatgtaccacattttctttatgcagtcttctgttgatgggcttttaggttgattctatgtctttgctattgtgagtagtactgcagtgaacatacacatgcatgcgtctttatggtagaatcatttatattcctctgggtatatacccagtgatgggattgctgggtcgaatggtagttctgttttaagttctttgagaaatcatcaaactgctttccacaatggctggattaatttacacttccaccaggagtgtataagcatttccctttctctgcaacctcaccaggatctattattttctgactttttaataatagctgttctgactggtgtgagatggtatcccagcaccatttattgaatagggagtcctttccccattacttgtttttgttgactttgttgaagattggatggttttaagtgtgtggtcttatttctgggctctattctgttgcattggtctatgtgtctgttttgtaccaataccatgctgttttggttactttagccttgtagtagtttgaagtcgggtaatacggtgcctccagctttgttcttttggcttaggattgctttggctatttgtgcccttttttgattctatatgaattttaaaatagtttttttctaattctgtgatgaatgtcattggtattttgagagcaatagcactgaacccgctaattgctttgggcagtatggcgattttaacaatatcgattctttctatcccctgcaattctttgttgttgtatttaactatttttacttgtgaagttttttcagggatgattttgttgaaagtgacaactctaaaaattatgttggtaattaaaattttaagtaatgacttttattttcagagattccacttctcttagactttggagctgttaacagcagtgtccaatctgcagtggtactcagcagtttctgtttcctgcatgcagaactgcttatatgaaaacacagttttaaaaatgctttcttatggctgacattcacattcttattccttttgattcttttcaagagggatttggtttgttaaaattaatttttgcaatacttttatgaagatacaaactctgacaaagcttttaaaacaagtttgagagaatacagtattgatttcacttgtaaatctgacaattattttagaaaaaaggaaaatattatttactattattttgcttataaatgtttatcaattttaaagcttccacattgcacatctcccactacaacagtagctaccatttattctttctcaaaaaaagtgctaagtgtgcccttgaaatttttacattgtgcagaatatccctaaaattttaaaacaaaaattacatcatcacttgctttaaatgtttcttctttatttaacatacagtttctaaaatgttagcaaatagcattttagaagagacacgttacttttctaatgaatgttctaaaatgaaccacagtaacctatacttacttagactgtgaaaaacaaaacttatattctattgttaaattttcaaaagtgaaactacacgatagtttacttggcacatcactctgttattgtgaattgacaaatgtatatgtagacaaatatgtgaaaatcagagtacatatacattatatgcagcaccacaatacattttttagtatgttttgactgatatttaattatataatttaccaagaggatctcaccagaatgtagaaaagtattgaattttagaacaattcacatatttaaaaaaaatgtagtcagcccttttatctgtatctggagaatgcagggtaaaggaataatacatgagtattggtatttaaaaaaaggtgttaatttcttacctatgatacctgttactttgggtatcatttaacctttatttctgtgaaatagaggagttctaacatcctctaattattataatattgttctaatttaatctatcttaatctgtgatacagtttgaaaaccaagcttttactattggcatgtgcaaaaaaataaagcagcagtagacttggaatcttgaatgcaaatttagattttgcctcttaataaatgtataatatagtgttctgggaccaattctctaacatttctgagtcctagtttctgcatctgtcaaatgggattagagatacctactttcaggatgtgatatggtttggctctgtgtccccacccaaatcttatcttgaattgtaatccccatatattgagggagggacctggtgtgaggtgtttggatcatggaagtgatttcctccatgctgttctcgtgatagtgtgggagatcgcaaaacatctgatggtttaaatatggcagtttcccctgtgctttctctctctcctgccaccatgtaagactttccttgcttcctctttgccttctgccatgattgtatgtttcttgaggcctccccagctatgcagaactatgagtaaattaaacctcccttataaattacccagtctcagatattctttatagtagtgtaaaaactgactaatacagagaattggtactggcagggttgggtactgctataaagataatctgaaaatgcggaagtgactttggaactgggtaacaggcagtggttagaacagtttggagggctcagaagaaaactggaagatataggaaagtttggaacgtcctagagacttgttttgaatacttttgaccaaaatgctgatagtgacgtggacaatgaagtccaggctgaaatggtcccagagatgaggaacttattgggaactggagcaaaggttatttttgctatgctttagcaaaaagactggcagcattttacccctgccctagagaactgatgaactttgagatgatttagggtatttggcagaagaaaatttctaagcagcaaagcatcctagtggtgacttggctgattctgaaagcgttcagtcatgtgcattcacgaagatatggtctgaaattggaacttaggtttagaagtgaagcagaacataaaggtttggaaaatttgcagcctgaccatgtagtagaaaagaaaaccccattttctggggaggaattcaagccagctgcagaaatctgaataagtaacaaggagtaataagtaataataagtaaaaagtaataagtaataagtaacaaggagccaaatgttaataaccaagacaatggagaaaatgtctccagggcatggcagagatcttcggggcagcccctcccatcacaggcctgagaactaggagggaaaaatggtttcctgctcagggccttgctgctctgtacagcctcacgacatggtgccctgcatccctgatgctccagctccagctgtggctgtaaggggccaagttacagctcgcaccattgcttcagagggtgcaagccccaagctttggcagctttcacgtggtgttgggcctgcaggtgcgcagaagacaagagttgaggtttgggaacctgtgcctatatttaagaggatgtatagaaacgcctggatgtccaggcagaagtctgccatggaggcagagccttcatggagaacctctgctagggcaatgcggaagggaaatatggggttggatccctcatacagagtccccactggggcactacctagtggagctgtgagaagagggcctctgtcctccaggccccagaaaggtagattcaccgacagtttgcagtatacgtctggaaaagccacagaatgccagcctgtgaaagccacaggggtaccctgctgagccacaggggcggagctgcccaagggtatgaaagcccaccccttacttcagtgtgccctgaatgtgagacatggagtcaaaggagattttggagcttttagatttaagggctgcccagctgggtttcagatttcatggggcctgtggcccttggtttgaccagtttctcccatttggaacaggaacatttacccaatgcctgttccctcattgtatcttggaagtaactaacttgcttttgattttataggctcatacgtggaagggacttgccatgtctcagatgagactttggtcttggacttttgagttaatgctgtaataagactttgggggactgttgtgaaggcataattggttttaaaatgtaaaaagacatgggatttgagagggagcaagtgcaaaataatatggtttggctctgtgtccccacccaaatctaatcttgaattgtaacccgcatgttttgggggagggacctggtgggaggcagttggatcatgggggggttttttccatgctgttcttgtgatagggagttctcaggagagttgatggtttaaatgtggcagtttcccttgtgctctttctctctcctgctgccaggtgagacgtgtcttgcttcccctgccccttccaccatgatcataagtttcctgaggcctccccagccatgcagaactgtgagtcaattaaacctcctttccgtataaattacccagtctcagatagtatctttatagcagtgtcagaatggactaatacaggatagtaatgaagattacagaatatgtagatgaagaagtgctaagtaaatagcagctattattatgtagtcaaattgaatgtatacattgtggtacttcagtgtcctttaaattgaataactagaaatttgttggctttctcaatctgctcacatcagatgacatgttaatttatgcctatacttttttctagttaatagatataaatctattcactcaacttctattgacagaactggtagtgtggcaagacatctcatttctagttaaggctgtataatattaagttcattttacttaaattaactatggtttgggaaatgcttttcatgtcatcatgtatgcccaatttgatactttagtgggacagtatatttcagaaaaaaacaaatgcttccccaaaaattccagggttgaatacattagtcagacatataacaatgtacttcagagttcctctaagggcaaaaatcgtggtatgaatatacaaaacactcctatttatacttttgtatttttgaaatgtagtcttcatgttaatttagcatttcaatgaccagcatgacattatcttaataatttggaatgccaatatgttcatttaagacttaatatagtaagtatctaaagaaaaaaatggaagtgactgaatgcttttgtatctcttaattataatttgtgctccattgtgatatgaaggatagaaggggcaggatagatagaaaacagaaattaactttgatgtttaaccttaccttaagactgtctgttaagtgacccacataatcttaaaaaactctgtcaagcttaatggatgctactctgcaggcccctgccaggcaacagtcacaaggttatgaggtgcatagattttggaattaggcagagctgaattcagatccaggtgttgccttataatgcgactttgggcaaataaaaggcccaatttttgtattcttatctgtaaaatggactcagtaaaaattatttgagataatttatttgtgtactgtacctaggcatgcagcttgacacacagaattacaagtcagtagtttccagtatgattattattgtgaaagagatattttgtttcacctactgaaaacttttttcagtcttaaattttttatctaactggctgtattgcagatgtctgctatataacttttatataattttaaaaactatttctttcctccttgatcttctaggggtaaggttaccaatgttttcattatttactaaatatagcagcccccaccccttattcatggaggataggttccaaaacccctagtgtatgcttgaaaccacagaccacagataatcccaaatcctatatgtatattgtttttcctatacatacatacctatggttaatgtttaacctactaattaggaagagtaaaagagtaatagtaactaataataaaataaaacaattgtaacaatattccagcatcactattcttgtgctttagggccaccattaagtaaaataagggttacttgaacacaagcactgtgatactgtggcagtccaactggtaacagagatagtgatgcggtttggctgtgtcctcaccagaatctcaacgtgaattgtatctcccagaattcctatgtgttgtgggagggacccagggggagctaattgaatcacagggtctggtctttcccttgctattctcgtgatagttaataagtctcacatgatctgatgggtttatcaggggtttccccttttgcctcttcctcatttttcttttgccaccaccatgtaagaagtaccttttgcctcccgccatgattctgaggcctccccagccctgtggaactctaagtccaattaaacctctttttgttcccagttttgggtgtgtctttatcacaagcatgaaaatggactaatacagtaaattggtaccagtagagtgggtgttgctgaaaagatacccaaaaatgtggaagcgactttggaactttggaggactcagaagaagacgggaaaatgtgggaaagttaggaacctcctagagacatgttgaatggctttgaccaacatgctgatagtgatatgaacaataagatccaggctgaggtggtctcagatggatattaggaactttttgggaactggagcaaaggttactatgttatgttttagcaaaaagactggcagcattttgcctctgccctagagatttgtggaactttgaacttgagagagatgatttagggtatctggtggaagaaatttctaagcagcaaagcactcaaaaggtgacttcggtgctgttaaaagcattctgttttaaaagggaaacagcataaaacttcagaaaatttgcagcctgacaatgcagttgaaaagagaaacccattttttgagaagaaattaaagctggctgcagatatttgcataagtagcaaggagcctaatgttaatccccaagaccatggggaaaatgtctccatggccatgtcagagaccttcacagcagcccttcccatcacaggcccagagacccaggaggaaaaagtggtttcgtgggccaggcccacggtcctcatgctatgtgtaggctagggactttgtgccctgtgtcccagctgctccagctgtggctgaaaggagccaatatagagctcaggctgtgacttcagagggtggaggccccaagccttggcagcttccacatggtgctgagcctgtgggtacacagaagtcaagaattgaggtttgggaacctctgcctagattttagaagacgtatggaaacacctagatgcccaggcagaagtattactgcagggcagggctgtcatggagaacctttgctagggcagtgcagaagggaaatgtgggattggagccctcacacagaatccctactggggcactgcccagtggagctgtgggaagagagccgtcatcctccagaccccagaatggtagatccaccaacaacttgcaccatgtacctggaaaagccacagacactcaatgccagcctgtgaaagcagccgggaggtaggctgcaaagtcacaggggcggagctgcccaagaccatgggaatccatcttttgcatcagcatgacctggatatgagacctggagtcaaaggagatcattttggggctttaaaatttgactaactcactggatttcagacttgcatgggccccgtaacccctttgttttggccaatttctcccatttggaacagctgtatttaacctgtgacacccccctaccccctgccccccatccctccggcccttgtatctggaagtaactagcttgcttttgattttataggctcataggcagaagagacttactagccttgtctcagatgagactttggactgtggacttctgggttaatactgaaataagctaagactttgggggactattgggaaggcatgattggttttgaaatgtgaggacatgagatttggaggggccaggggtggaatgatatggtttggctgtgtccccaccctaatctcaacttgaattgtatgtcccagaattcccatgtgttgtgggagggacccgggggtgggggtgcagtaattgaatcatgggggctggtctttcctgtgctattctcatgatagtgaataagactgacgagatctcatgggtttatcaggggtttccaaaacttttgcctcttcctcatttttctcttgccaccaccatgtaagaagtacctttcacctcctgccatgattctgaggcttccccagccatgtggaactgtaagtccaattaaacctctttttcttcccagttttaggtatatctttatcagcagtgtgaaaacaactaatacagatggctagtaagggactaaccggcagggagcgtctccagtgtggatatgctggacaaagggatgattcacgttccagggcataagatttcattactcagaattgcacagaatttaaaacttattaattatttctggaattttccacttaatgttttcaaactgtggttgactgcaggtacctgaaactgtcaaaagtgaaaccacagataagtggggagtcctgtacctaagattattcctttaaattgtttcagtggatatgtagggacctgagtgtgaagtgagagcagcagcatcaaaacctgagggaaatccagatagcaaaagaaacttgtctagtatactggcatgacagagaaaccaaaaagttctcaagttaatgtgagaatctaagaattaaagaattaagcctttgcctttgagggaaggaaaggggtaatgtggctttaaatcaggttgagattggttctgagggttccttttccttcctttatattgatatgaatatagacacaactgttctgcatttccatttgtttttataaatgtctttttaggatttaggaactgctaattatgcaatatgagatatctgttagtttgaggaacatttgaaaatttggtcaaatgacacagatcgtcacacagttttaagacaaatgtttttacctatttgacctagtctggcaatccctatttgggcaaaaatcttcatttgcaggtcatgattggaggcaggcacagaaaaaaaattgccaccttttttgcattatgtcatcaagacatcaaacttcagcctacaaagtagaaagtgttatttctcaagttgaaggcctggatatacctcagcttctcagttctgacactttatcatagtggaaaatgaagaagattgcttaagaacactgatgttggtgtcagaaagacctgggtttgaaccctgactttactagttacttagatcactttaggcaactcaacttttctaaatcttgtttcttcatctgtaaatgctgaaaatagtacccacctcttaggtctgtggagaggattaaatgagataatctatacaaagaaagagcttgcataatagtgccaagtaatggtgaggttatacctgtattctgattataatctcataaatatttaccatgttagctgtctcagagttcttttgcaaaacagataaagatagaaagtataaataagaaaaataagtgaacatatactgaactttgtacaagatgctggcgatatggagagacccaagacatgggccctacctaaaagagattattgatagaaacaggatacatatacatcaaaaggtaacataggatcatctgtgcaaagtgctatatggcagtgttttaggaagtctagaagctgtcatggatcaggaataccatggtggacacttcaggcagggaaaacagatcttagcaaaagctactcctatcataggtacttgataaatatttgtagaatccaggatccctgtagtgataaagaaactacatggattatgtaggggagtgataagacatatgactggaaaaataaaaagaccaaattatggaccatactgagcttgtactataaacagtggaggagcccttcagatttttaatcatgttgagaaaagagttttagcagtgtgtgggggatagaatggaaagagaagccagtgccagaaggactacttagtatcaaccattgcagtggttaaagcaagaggtgagagaaggcatgcattagaatggcagcggtcagagtggatgggaaggaataggtcctgacatagtgttacagggagtaataaataggatgtggaagatgggttagaattggcaaaatctctgcatgtaagtctgggttactaaatatagtgagagaaattcaaatctctctttaagaatcgaataaaatatttagaaataagttactgttgtatttgaggtgaacacaaatggcatttcaaagatgctcgagataccttgttggaaaaagtcaataactgcactattgtctccaacatgttcttgccttctctgaagacatcatgttcctaattctgaattatgaaccatctattatccttgtatgctcttatgtgtgaggaaccataaggtgggaacaaaatccggtcttcattctagaaataactatgcgatcaaaaagtttttagtctttcttcttaccatactggttcttggtattctgtttaccattcaatgtactattattgcttctgcttaaaactcgcatcccctaatgcaagcctgagcaaacagaactgataacacacagcctgagaagggagtgcttggggtctcaagacttattctgtttttctccatctttgacacttggtttgaagagcaaagaaggatacagctgttaggaagtaagttacccaaacacagtgaccaaactggattaattcttccaatgagaaagaaatacattatttctgtgagacagattagactttaagtagcatagataacatgattatattctctctacaaataaatacacaggacctaagaaaccctttacagatccaagtgttttcctctccacttttccatccccaaacccatcttgcaagatatggccagcttatttggagttaattaaatcaagaccttcgttttacagacagggaaaccaagcccagagacactgagtagtaggccactggtgtcttagaggtctgaaaaatcctttactgaacattctcttgatctattaatgtataggttttgttgctgtaaccctctccccaagaggagtgaatataaatgatgcagagtttggatgaactatcttaataagaacctaaagttgaaaccaatgcaaacctctctcaataaatgcaaagcaaagagaataatcagtctttctttggcttgttaaataagataaaatgtgttctgctaaaaccatttaacagaaatattgtgaaaggtttcccctaaagcatttttctatttgatttgaaaactattccatagcttattatcaaacaaatcagtaatcctttagctaatgcagagataaatgggcagtcagaaaatataatcacctggtgtgtgcagctgagtatttacatttttcctaatgaacaaagataagaaaagtgcaggtgactttaatgtgtaaaaactaccttttagtgctagcgctagagggaaaaagaaattactggctcaagccaatcctgtacttgataactaagccgtatagtccatggcttggcttcagttctgttttgaatctctttttggacttgtcttgaatggactgtttagggctgcttcagtagtgcagttgttgcatttttaagcatagtttaggttttaaaatgtttctggtccctttttttttttcttttccactttatgttgcttaaagctttatggccaggttttctcatcctcagcattattgacatttgaagctggatacttctttgtggtgggggctgtcctgtgccttgtaggctggttagcagcatccctcgcctcttctcacttagatgccaatagcatttccccaaccgtgataaccaaaagtgttttcagacactgccaaatgtctcctagagagcaaaattgctctctgttgagaactactgtgttacggtgtttggacaaaaactgacaagccaatgggaatattctattggtagttgtaaaaaattaatccagttatagcagctgtatttctggaatttttttccatattaacacttgctttctgaggtgataatatctttgttttttttctcccaaatagatttcttgcattacactgaaaaattgctgattaattcacttaaattgaagactaagccaatcatgtcatttgggtaatagtttaccaactctgcccctttctctgtcagggaagcctctaatttagtaagcgatactgtatccttttgtcaggtacattaccattcctattagcaatagggcaattgagattgagaaagattaaaaggtcaccaagctattacattgtagaattaggttatgaattgtagcctatctggtttagaatctttaccttactagtctccataacaacaattcttccagtgtggtccatggggccctgggagtctccccttaaagggcagactattttcacagtaacacgtactttatttgccatttcattatgtcagcatttgcaataatggtacaaaagcaaagatgagtaaaactgttggcatcttagtatacagtagttactgtattcactgtcatgcacttaaaatctttgaagaagcaaaaaaattattaattacattaaatttcaacccttaaatacatgtggtctttctcatgtcagtgtgacaaaatgagaaggtgcataatccacttatatcgcatatagcatttgatagttgtctcaaagaaaagtgtataagattaaactgtgagttaacctactttttttcatggagtaccatgagagataaactctggttttcagccttgggtatttggcgatgttttcccaaaaatgactgaagtaaacttagcactttaaggaaaacaacttaaagtatttgttgccaattgataaaatataggtttcaagcaaaaatcagaatttttgaagacttgtatctgccactgtgagcttgacaaatgtgactcttttatattacataatgaactatgtcaacatttgaaagatctgcataactcagtgaaccagtattttccagatgactaatgcatgataatacaaaatcatgcatgggtaaaagatacattcaaagtgcaagatagactgacatatttcaatgtaacaatcaaaagttcattgataacagttttggattccacattgcaatactaaaacctttaaaaaacgaaattgtccaattttggtgtagtaatcagaaaaggcaatctataattacctgaacttaagtttctggaggaccattaaccttctacaggctcatggggaagactgtagcacttctctttccctaagatcctccagaaaggaagaaggtaatccttgggggtagggtagagacctattgtgtgatgatcaccaagtatgtaacaatgctttatataactctaatatatataatccacacaaaccccctaaaatggcactaataagggaatggactcaaagaagttaagtcagctagccactgtcacagctattagagcactggaactaggatttgaacccagatttgtctgtatgtaaagctgattctcttcgtaatagtactgagacacaagaggcggctacaaaatattctggtactccatcctagaccagagtttcaaggttcgttatcatttgtagcatgatactggatcctcacagtgcttgcctttcattcaggtgccaggaaacgtctgcctgaatgaatgggtgtaatttacctgcacattttacatgcttctctaggtgtgtgaataactcataatccatccatgactttcacccataatcctccttgtagcaattgctttgcttgcaacaaaactaagtagacatatctagctttatgcatggttttctctctctgaactctaacataaactcagcctcaggaattattcggtttctactacatttgccattctgattgggaaccaccagcattcaggtattcacctggaacaaggcattttgttccaagggttcctcacttaaaagcaagcaccctagcaatagttcataatggaacttcttaacattctcagaatgtttggcacagctgtgagtgaacacacattgagcaatcaataactattacagataatgatgcccttaagaccaggatattttagctttcccattcaaagggggtgaaatatgcactcttactatggtatacttttggttccttctgccatgtatccttaataaaagatgtcaattccatatggttttctcttgagttctaaccattttgttgtaccctagcccttttaacaatatcaaacttgcaactgaataccatttagcattcatccattttttccaatggtgttcattataggctatcttactcctcctatttgtatgacaaaaattggcttttttcaccgatgtctatggtacatctggcagctttccatgtactcagttcttatctgatgtagcccagaacgactgcctgaagggatgccaaaagcctgattgaggttccaaattttcagctactgtactatcaatccatttgttcatttttactttcccttgtcatctgtagcttacagttgagtggcctgaacatgttttgcatacattgtaatatctaagaatttgggaatacggtcctaggatttagacttaatactaccttccatttatataatacttactcataaaatcttcagtgttcctgaaaaagaaaaaggaacatgtattgagtgcctgctagaagcaggaacttgtagtagattttctatgtgttaccttattttcacaacacacacacaggtgatatccttcccagtttactgatgaggaaactcaggggtcaaagtagtagatacctacccaaggtaacagaagctgtgaagtggtacagctgggatctaaaatatgtcagcttcaccgtagataggctccctgatgaaccacctgccacggcccgtatgaccgcatccaggggtgatgatgtcattttcacagggttattgagagctaaaactacgaagtactacaaactattatttaaaatataaatacatactatatatgcatatgtgtgtatatataattaatggggtaaacattacagaatactgtcctaacctttaaacaatgcactcgttttctgtaaactaatatacaaacaactgtttggtccctaaaaatagatgtcaggtgacagagactggctgagcaagaataggagtatcttcagaatagaagccagaggagtttttgcttccccaacacattgtcgcaccattcactgttccaggaccttcctacttctctggaaaactctggcccaaagcagctcctctacattagtcacaagtttccattaatcaggggtggcctgtgccggacctacagcagagtcatttcaggttattctgttacaggctttcgacgtgtagtcagtccactcgcccaaatctagcagggaatgaatgccttgtaatacggaagcatctacaaattcttcttaacagtgttcagagaacaatgtgaaaccctggggccttttcccagaattagggtggtgggaatgctgtcctattgactaagcctgttaggtaagcaggcagttggcaagattcaggaagcttcatttgaagatagaatttagggcgatcgtttggatttactggcttaattacttaaggtaacatttataaaagaaattgtcattccattattattaccttttaacttttattcctaaacggaacattagcaacaaactacattacttgataaatgtaatttctaaccagattgataactagaaaaaaattttaagttactttgctctgtgaattagtttaaacatatttgtaattgagacttactactgttattggctgaaataaataaaagcaagagataataaagaataacagagacaacgaacacccaatttaagtttatttctaagttccatcttttttagagaaaaggcaaattaagaaaagtttagagagaggtactagtatatttatgaacttgtatagatgataagcaaaacggactttaatatgtagaattccagaatcaacaggttgccagcatccatgtttttgaagatttgcttaagaacacaaccaaaaatggaatgggcagtctctaattacaagcagaaggctacaaaatcattttagctgcataatacagttttggttctaaagtcagcacgtaagaggaaaattccttaggaaaatacaacattgaaaaccattgtgtcatgtaatatgaaatgcaataattaatttttcctccagtaatagaaagatcactgtttcattggtttataaaaatatatctttatcattaaatgtggcaaaatgttaagacttggtgaatattggtgaaaagtatatatccattgtacaattctttccaattttttttgagattgaaaatttttaaaacaacaaattatcttttaaacagctaataatcactagacctgcactctttgtggtgagactatgaaaaatgttagagacctagtaagagaagcagattcacatttctgtcttcttcttcaagccaaacagtcatagagtggagtgggcagaatggaactcacttttgaaagcctagtgctttgtccaatcttactgcaagccagacaggaaggttatagaaaatgtttctggatcagtcttctctgagtcatatgaaattgtggtttcagccaagatgacattaggaattagagacatgggacaaaaactttaagattgtaaaaaaattttgactctagtaggaaacatgggtagaattgtaatgacacttgattgaattttaaaagatgcctgtataagatcttaaaattaggaaaaaaattatggcctaagcaattaaaggcataggaggcatctttttgggatgatggaaatatcctctctcctgattgtgatagtagttacatgaatattcatttaacaaaaaccataaattatagacttagaaaacagtaaatgttactgtatgtgacaccttaataaacgtgattataaaaataaatcctaagcatctaaaaaaaaaaaaaaaaagaagaagaagtgaaccagaaccacaccattctattttggagacacttcaaaagaaatgacctcattcttaattttgtttaaagaagaatataacatgatttgaatatatttagctaggatattttagtgcctgctagcacttgaagccagagttcactgtgagcattctga

SEQ ID NO: 221 - DNA, 4788 bp, Homo sapiens
tttttagaaaaaaaaaatatatttccctcctgctccttctgcgttcacaagctaagttgtttatctcggctgcggcgggaactgcggacggtggcgggcgagcggctcctctgccagagttgatattcactgatggactccaaagaatcattaactcctggtagagaagaaaaccccagcagtgtgcttgctcaggagaggggagatgtgatggacttctataaaaccctaagaggaggagctactgtgaaggtttctgcgtcttcaccctcactggctgtcgcttctcaatcagactccaagcagcgaagacttttggttgattttccaaaaggctcagtaagcaatgcgcagcagccagatctgtccaaagcagtttcactctcaatgggactgtatatgggagagacagaaacaaaagtgatgggaaatgacctgggattcccacagcagggccaaatcagcctttcctcgggggaaacagacttaaagcttttggaagaaagcattgcaaacctcaataggtcgaccagtgttccagagaaccccaagagttcagcatccactgctgtgtctgctgcccccacagagaaggagtttccaaaaactcactctgatgtatcttcagaacagcaacatttgaagggccagactggcaccaacggtggcaatgtgaaattgtataccacagaccaaagcacctttgacattttgcaggatttggagttttcttctgggtccccaggtaaagagacgaatgagagtccttggagatcagacctgttgatagatgaaaactgtttgctttctcctctggcgggagaagacgattcattccttttggaaggaaactcgaatgaggactgcaagcctctcattttaccggacactaaacccaaaattaaggataatggagatctggttttgtcaagccccagtaatgtaacactgccccaagtgaaaacagaaaaagaagatttcatcgaactctgcacccctggggtaattaagcaagagaaactgggcacagtttactgtcaggcaagctttcctggagcaaatataattggtaataaaatgtctgccatttctgttcatggtgtgagtacctctggaggacagatgtaccactatgacatgaatacagcatccctttctcaacagcaggatcagaagcctatttttaatgtcattccaccaattcccgttggttccgaaaattggaataggtgccaaggatctggagatgacaacttgacttctctggggactctgaacttccctggtcgaacagttttttctaatggctattcaagccccagcatgagaccagatgtaagctctcctccatccagctcctcaacagcaacaacaggaccacctcccaaactctgcctggtgtgctctgatgaagcttcaggatgtcattatggagtcttaacttgtggaagctgtaaagttttcttcaaaagagcagtggaaggacagcacaattacctatgtgctggaaggaatgattgcatcatcgataaaattcgaagaaaaaactgcccagcatgccgctatcgaaaatgtcttcaggctggaatgaacctggaagctcgaaaaacaaagaaaaaaataaaaggaattcagcaggccactacaggagtctcacaagaaacctctgaaaatcctggtaacaaaacaatagttcctgcaacgttaccacaactcacccctaccctggtgtcactgttggaggttattgaacctgaagtgttatatgcaggatatgatagctctgttccagactcaacttggaggatcatgactacgctcaacatgttaggagggcggcaagtgattgcagcagtgaaatgggcaaaggcaataccaggtttcaggaacttacacctggatgaccaaatgaccctactgcagtactcctggatgtttcttatggcatttgctctggggtggagatcatatagacaatcaagtgcaaacctgctgtgttttgctcctgatctgattattaatgagcagagaatgactctaccctgcatgtacgaccaatgtaaacacatgctgtatgtttcctctgagttacacaggcttcaggtatcttatgaagagtatctctgtatgaaaaccttactgcttctctcttcagttcctaaggacggtctgaagagccaagagctatttgatgaaattagaatgacctacatcaaagagctaggaaaagccattgtcaagagggaaggaaactccagccagaactggcagcggttttatcaactgacaaaactcttggattctatgcatgaagtggttgaaaatctccttaactattgcttccaaacatttttggataagaccatgagtattgaattccccgagatgttagctgaaatcatcaccaatcagataccaaaatattcaaatggaaatatcaaaaaacttctgtttcatcaaaagtgactgccttaataagaatggttgccttaaagaaagtcgaattaatagcttttattgtataaactatcagtttgtcctgtagaggttttgttgttttattttttattgttttcatctgttgttttgttttaaatacgcactacatgtggtttatagagggccaagacttggcaacagaagcagttgagtcgtcatcacttttcagtgatgggagagtagatggtgaaatttattagttaatatatcccagaaattagaaaccttaatatgtggacgtaatctccacagtcaaagaaggatggcacctaaaccaccagtgcccaaagtctgtgtgatgaactttctcttcatactttttttcacagttggctggatgaaattttctagactttctgttggtgtatcccccccctgtatagttaggatagcatttttgatttatgcatggaaacctgaaaaaaagtttacaagtgtatatcagaaaagggaagttgtgccttttatagctattactgtctggttttaacaatttcctttatatttagtgaactacgcttgctcattttttcttacataattttttattcaagttattgtacagctgtttaagatgggcagctagttcgtagctttcccaaataaactctaaacattaatcaatcatctgtgtgaaaatgggttggtgcttctaacctgatggcacttagctatcagaagaccacaaaaattgactcaaatctccagtattcttgtcaaaaaaaaaaaaaaaaaagctcatattttgtatatatctgcttcagtggagaattatataggttgtgcaaattaacagtcctaactggtatagagcacctagtccagtgacctgctgggtaaactgtggatgatggttgcaaaagactaatttaaaaaataactaccaagaggccctgtctgtacctaacgccctatttttgcaatggctatatggcaagaaagctggtaaactatttgtctttcaggaccttttgaagtagtttgtataacttcttaaaagttgtgattccagataaccagctgtaacacagctgagagacttttaatcagacaaagtaattcctctcactaaactttacccaaaaactaaatctctaatatggcaaaaatggctagacacccattttcacattcccatctgtcaccaattggttaatctttcctgatggtacaggaaagctcagctactgatttttgtgatttagaactgtatgtcagacatccatgtttgtaaaactacacatccctaatgtgtgccatagagtttaacacaagtcctgtgaatttcttcactgttgaaaattattttaaacaaaatagaagctgtagtagccctttctgtgtgcaccttaccaactttctgtaaactcaaaacttaacatatttactaagccacaagaaatttgatttctattcaaggtggccaaattatttgtgtaatagaaaactgaaaatctaatattaaaaatatggaacttctaatatatttttatatttagttatagtttcagatatatatcatattggtattcactaatctgggaagggaagggctactgcagctttacatgcaatttattaaaatgattgtaaaatagcttgtatagtgtaaaataagaatgatttttagatgagattgttttatcatgacatgttatatattttttgtaggggtcaaagaaatgctgatggataacctatatgatttatagtttgtacatgcattcatacaggcagcgatggtctcagaaaccaaacagtttgctctaggggaagagggagatggagactggtcctgtgtgcagtgaaggttgctgaggctctgacccagtgagattacagaggaagttatcctctgcctcccattctgaccacccttctcattccaacagtgagtctgtcagcgcaggtttagtttactcaatctccccttgcactaaagtatgtaaagtatgtaaacaggagacaggaaggtggtgcttacatccttaaaggcaccatctaatagcgggttactttcacatacagccctcccccagcagttgaatgacaacagaagcttcagaagtttggcaatagtttgcatagaggtaccagcaatatgtaaatagtgcagaatctcataggttgccaataatacactaattcctttctatcctacaacaagagtttatttccaaataaaatgaggacatgtttttgttttctttgaatgctttttgaatgttatttgttattttcagtattttggagaaattatttaataaaaaaacaatcatttgctttttg

SEQ ID NO: 222 - DNA, 2334 bp, Homo sapiens
atggactccaaagaatcattaactcctggtagagaagaaaaccccagcagtgtgcttgctcaggagaggggagatgtgatggacttctataaaaccctaagaggaggagctactgtgaaggtttctgcgtcttcaccctcactggctgtcgcttctcaatcagactccaagcagcgaagacttttggttgattttccaaaaggctcagtaagcaatgcgcagcagccagatctgtccaaagcagtttcactctcaatgggactgtatatgggagagacagaaacaaaagtgatgggaaatgacctgggattcccacagcagggccaaatcagcctttcctcgggggaaacagacttaaagcttttggaagaaagcattgcaaacctcaataggtcgaccagtgttccagagaaccccaagagttcagcatccactgctgtgtctgctgcccccacagagaaggagtttccaaaaactcactctgatgtatcttcagaacagcaacatttgaagggccagactggcaccaacggtggcaatgtgaaattgtataccacagaccaaagcacctttgacattttgcaggatttggagttttcttctgggtccccaggtaaagagacgaatgagagtccttggagatcagacctgttgatagatgaaaactgtttgctttctcctctggcgggagaagacgattcattccttttggaaggaaactcgaatgaggactgcaagcctctcattttaccggacactaaacccaaaattaaggataatggagatctggttttgtcaagccccagtaatgtaacactgccccaagtgaaaacagaaaaagaagatttcatcgaactctgcacccctggggtaattaagcaagagaaactgggcacagtttactgtcaggcaagctttcctggagcaaatataattggtaataaaatgtctgccatttctgttcatggtgtgagtacctctggaggacagatgtaccactatgacatgaatacagcatccctttctcaacagcaggatcagaagcctatttttaatgtcattccaccaattcccgttggttccgaaaattggaataggtgccaaggatctggagatgacaacttgacttctctggggactctgaacttccctggtcgaacagttttttctaatggctattcaagccccagcatgagaccagatgtaagctctcctccatccagctcctcaacagcaacaacaggaccacctcccaaactctgcctggtgtgctctgatgaagcttcaggatgtcattatggagtcttaacttgtggaagctgtaaagttttcttcaaaagagcagtggaaggacagcacaattacctatgtgctggaaggaatgattgcatcatcgataaaattcgaagaaaaaactgcccagcatgccgctatcgaaaatgtcttcaggctggaatgaacctggaagctcgaaaaacaaagaaaaaaataaaaggaattcagcaggccactacaggagtctcacaagaaacctctgaaaatcctggtaacaaaacaatagttcctgcaacgttaccacaactcacccctaccctggtgtcactgttggaggttattgaacctgaagtgttatatgcaggatatgatagctctgttccagactcaacttggaggatcatgactacgctcaacatgttaggagggcggcaagtgattgcagcagtgaaatgggcaaaggcaataccaggtttcaggaacttacacctggatgaccaaatgaccctactgcagtactcctggatgtttcttatggcatttgctctggggtggagatcatatagacaatcaagtgcaaacctgctgtgttttgctcctgatctgattattaatgagcagagaatgactctaccctgcatgtacgaccaatgtaaacacatgctgtatgtttcctctgagttacacaggcttcaggtatcttatgaagagtatctctgtatgaaaaccttactgcttctctcttcagttcctaaggacggtctgaagagccaagagctatttgatgaaattagaatgacctacatcaaagagctaggaaaagccattgtcaagagggaaggaaactccagccagaactggcagcggttttatcaactgacaaaactcttggattctatgcatgaagtggttgaaaatctccttaactattgcttccaaacatttttggataagaccatgagtattgaattccccgagatgttagctgaaatcatcaccaatcagataccaaaatattcaaatggaaatatcaaaaaacttctgtttcatcaaaagtga

SEQ ID NO: 223 - DNA, 38596 bp, Mus musculus
  misc_feature (25545)..(25970): "n" at positions 25545 through 25970 can be any base.
  misc_feature (27817)..(27864): "n" at positions 27817 through 27864 can be any base.
ttagtgctaagaaatccagagagggagatgcggtgtgtctctggagcagggcatggctcagtgggacctgtctgccatggtgtgttatgttagaagctgaggatctgagtccggcttgctgtggtgctggtgagccatggaaagggatccaatggtggctactgccctgagtctctaccaggttgtcacacaaaattcactcatgtagcagagaagtggcacatcagagtcccttcctttctctggttctatctgctgatacagatgaaggaaatatatatatatatatatatatatatacatacatacatacatacatacatatatatatatatatatatatatatatatcaatcacctgaaacctccaatacagagacatggttctgatgaatggttttaaggaacaatgctatgtgcaggcctagtgtttaagaaccagtgaggatgacagagataggtaggtgcaccaaggtgagtggtggtgaattggatggccttggcttaaagacagagtccttcatcgggaggtgactcaccccaaggcccagccactcgaagaacagccagtggattggaacgtcccaggacagatgccacagccttgacccaggttggaggtgcacggatctcactagggtcagttggtcgtaggggaaagccccatggatccaccaggataagatgtttaactctacattaaacagaagatacactgtatttgcttggaggtagcatagtttttcagttgctggggaatgagagcattactggaataaatattggaacgtgtaggaaggcagagtcagctcatgagtgagaagagtagcttaagttacctttcagggtacttgatagagtaagaagtggccaggaatcctcccaaactgtgccccaggaggatcatggtggggattcccatggtctcccgccatgtctctattgaggtcacaaactcatcttcagctccttctgggtcccttgggaatgttggccttgagcttcgcccaaaaccaagcagatcaaaggtatgaagtgtgcggcgggcactcagtgaatccatgttgaggatccagaggcccacaccgcccccaaagccatgtaccatcaccagaggggtgcgatccttttgttctgggctcacagtcaccgtccagatcttgttctggtttgggagggatacataacgggccaggaacttgttctggagacctgggaagggaagaattcctgggtaaagcatcaagaatgcttcctgagagcacagacattttgcctagaatacactcttcagttttctctcctcttaaagagatcattttaggaagccctcctagtctccacagtgagttccaggacaacgagggccacatagaaagaccctgtctcagaagaaaagggtaataatgatgatgataataataataatgataaaagaagacatgctgaggaagccatgggaagcaagccaggaagccacattgctctatggtctctgcttcaggtcttgcctctaggttactgccttggcttctaaacttcatgatggattgtaacctgtaagccaaataaacatttcctccccgagtttgatttggtcaatattttaatctcaggaacagaaagtgaactaaaacagcctcatccatcttcggcctccttagcccggccttagacagaaccctaagtcaggttagcaagaactgtcacgtggtgtgccctgttcccccatctttagatctgatccagtgaaccaacttctatttttttgtgttaagtccttgacttttcttcagcaagaatcttgctgagttcactcagaagaaactccccgtcttgaggtctttagtaatctccatccactgaccctgtccgttccttagctctaagttccccagctgttcctgtagcatggggaactgggaatgttatcatcccagtgatgacaggtcgagggcgttgagggaccactgtcgtggaatactgtgttgtctgtctgtatcctccctgcaagccaatgattttctttcctctaacccatactctcctaatgaggaatcagggggctcagtggacccaggttggggaagatcctgtatcctttccaggccttttaaaggggaggagcaaactgtcccttctacttacactggaggatcctggcttccacattcttcagttgagacatggaagtggggcgccaagtggggagccagctactcagccagccctgaggcctacaagacacaaaggtacttactgacaacactggaaagaagccactgttcccagccttgctgatagctcctagagttatcagggtacaaggtgtttcccaacttcaggaggcctgcccttcatggtcttcaatatcagcaatgcctaagcagtccgatagatacactgttactctttccttaggcaaatggctattaagaacaatggcccttaacagatagcagataccatgtacacaaaacttgactcttttgtatttattaccttcctggagctttacaactcctctttgtttctggttattttaatctatgttcaaggagattacagagggagagggagagactttcactaatatttccattattctttgtcactctcagaactagccgttcttttagggtattacagacaaattcccatctgctgtcatgcatgcttctggaagtttggggtgctgttagtgcctgattggggaatccatccatcagggatgaatttagagctggggcaggcaaggaccaaggggtaagatatctggattcatgtcaccaaaagacacaggtggcctctggcccatttttcaggttgtaaaactaggagaaaacttgcctatgtcctagagtaaaactggtaacttatcctgctttccctttcacacccagtgactcagccactgaagagcagaggtgccaagcactggctctggagtatacagaactcctgggtctgaactatagacccacaagtgaggaacggaaggggttgaggtccagacatacagtgaaccttgacaggtgcctgccacaaatgtagttcttgttctacctttcctgtcttgcatgttttctctctttttgtgaactctgcctaggtgaaggtaagaggatggttgcagcaagggcttgtgggtttgagcaggagaagatgatggcatccttggcggaaccatcccagctactcatagcatacacaatgggtaccctgagtatcatgggaactcgctggatgaagcaccagtacctagaccacagatcttggccagtctcaaaagagagacttcctctttgcattgtaggctataacaagtcagaccatgacacctgaatgaaccccacacatctctaactctggacagcagagctcaagagaaatgcttccctatgagacagcaacactggcagcagtccacacaggcctggaaggggtgggggttgggggacagggagctatgggcacagcttggcctttcttctgtacaaacaatccagaaagagaaaaggcaacagtgcctgtcacactgtgtgtcagtgctattagggaggtgagagctgaggtgggagagtgaggcaagcagcctcttaacattgagcaagtctctgaatttctatgggcatccgcatctgttgctttatttgtaaaacggagctgaatggcctgagtcttctttggctctagtgccgtttcccgcaagtcactgtaggcaccataaatttcctcttagaaagcaatactcttcttgggcagttcttttaggtcccttacacgattgtttactattgatacaaagttatttcgttgttctgcagatccaaaaggacaaatattaggtcaagggaaggccctgttcccgtgaaacccttggagctgagtcattctcctctaagcaactttttcccgatcctgttagaccaccatcacacaggtggcatctcaaacttgatggccttgggcgagcagtaaccacatcccaatctaacaaacctacttctgaaaccacggcagtaagcatgtgtttatgattaagaacactatcaactaggattgcaagcagaacgtaaaggcggccaagggctaaaggaatttgcaagccagtttcacactaattccaccgtagtggagacttctttctcctacccatgccttgtccttcaagggcttttcacacccacgactttagttccgggcaagtctccacaagcaccacgtccgcatcgggaagagctagcttattctcgtgctttaccactaatctaactgggctaccaggggggcgatcgcgaagactagtggaaagtcagagtccccaggctgaacgcaaagcttaaccctcaacactctcccagctccgcagccttctcatctctcagcgctcccggggctcctgagcgcaacccatccctccctggaagccaacctgaaaggaaaggcggggagtctgaagctgtccgcaagtacagacagtccccggatcctggcccggacagatagagacagaaagagaaacggacaggagtaactcactgctgctccagatcatcagccatagtaaacaagccctgccgggtcgagctgagccagcccatccctccgctcgacgccagaaccagctgacccagggaagtatcggataacaaagggggcggggccggaggcggggcctgggtcgctagcggggttctagcaggcaaagttggcagaccgaccaactcagcacatggacagcaatcagttgggtgcttccttctgtttgctccctctggcctgcgtccaggctgaacactacagttccacaaaagtaggctcctaatccggatcacatccctttgggggacagtgagggagacaggaagacaggtagtttaaaactccaagttcctcactggaatgccaccagccccgcctccacacctccttcaattaaagagtgaaggaactgctttgcctcttgctcacgttctcaagcttccctctgtatctcaggtcacagacgcttcatctgccttggtagtcctatggaaatgatttagatgtccgtggagtcataagggtgcttcctataaaagggcctcggatattgtaacccaagatttcccggttccagaaatacaaaaagcaagctgcctagttaaattttagacagcaaagtttaaagctaagtaggctccctgtagtatttggggcatcctgtattcacagctctaagatgaggggtgacacctgtcagcataagcatttctctgttctggggatgtcttgcctcaacctactttccaaggaaaaagtagcagtatcctgcttccttccattcggtggacctcccagaggagggccagttaaaggcctaacgcataaggctgggcgtgattaggtatgtggatataagattaaggatgtgggatgtgaagtgacttaacccagaagttttgagcacatttcaggctggctcggcagagaggcgggacacatcttgaagctggcttcagaattcacttgaaatggcaaagggggtgtggcatccctggagcggctccctttccgattatccactgcagtagtttaatcatacttaaggggaaagaatctactgaggactctctctctctctctctctctctcactctctctcgctctctctcgctctctctcgctctcttacacacacacacacacacacacacacacacacacacacacacacgtcaaggtgtatttgtcctgggttggcctcacattggatgtgtatctgaggatgatcttgcttccgagtctcctgtttctatctctggagtgctgggattatagggtgttctgccaggcttgttgattcaagattgtggatcgaacccagggctttctgcttgctagctaggcactttagcagtggagctatgttcctagtcctacagtacttttctttggtcttcttgaaagacctaagtgaacctgagatttattctttccagaaacacaatgttaaactgatcattataagggtttaaagttgaagagaactggaattttcagaaatgtccatccatgattttagccaagctcagtggtcccacaattcactatacacagtcattgggtaggcttgataacaacgcagcttcctgtttcccatcctcagaatctaattcagttagtttggtttgaggctagaaagctgcttttcttttctttttttttttttgcattgaaggtgctggtgttccagaagacacactagttaaacaaatagaaccaatggtcagaagtctgggttaagttcaagttctttgttttgtcatttatttcctgatcttgggcaagtcattttgtctggctgctgcttcttctggagtgtgtggcttgtgagaattcactaaggcaattcaaagaagatttagcatacgtactttaacaatgatgtatcttatgtccaaagccaaacattatgttacacaaagaatccaatgataaaaagaaaggaagtcatcttttttggtggtccccctacagactccccaggctggttttggagagctggcaactatgtagtcagaacttagttcaaacttccctccttctaaaagagacccccatcatcagggcaccacatgactttagtttattttcctcagaacaccattttaaaaggctcttgcataatccatactcatttgcccctcctccagaaattaagtttcagggggggaatcttgtctgtttagcaccctgctttgctccctgcccacagcaaggtatgtgcttggcatttggtgaatgcatggacaagcaggctagtaagcatgcctgtctgacagaatgaagcattaagtgctaagaatgaagtactaaattctgagggtactaagtactaagtagctgacagaatgaagtactaagttctaggacaacaaaagctcccataatctgataacctataaaatgtgggtccttttgggaaaggctgatcaggtgcgactggtattaggactttagattctagaacatatatgaggaacacagtgcagagagcattagtattctgtctccacatgttccaaataagcattagcatagttgtttagaaggaagaaattcaagtatatggaaaatgttctttataatgaaagttatcctaaggtatttccagaattgatataactcaggattgagtagatcttctagaattatatacaatgaaatgaactcttggtacctactctagacaggcctctggagagaaaaatgtattctccccttcttatcttgaagtcaagacacatatggaagaatatatcctatcttaaaaacatatcttttaaaacatgcatgatttgatacataaagtattgtactcttttttattttttttctggttttgtttttttgagacagggtttctctgtgtagccctggctgtcctggaactcactctgtagaccaggctggcctccaactcaggaattcacctgcctctgcctcccaagtgctgggattaaaggcgtgcaccagtactgcctggctgataatataatttcttaggagaaagaatgaaagaatcacagagtatgccccctctactctcccatatcttatattgtggagcaccttagtaatgaagcctctaaggtcttctctgacttctgatttgacttaaaacctaatttgtctttgccagtcatcagatttacagtgctagcgtcatcttttgcatgcccaaagtattggagctttgcagtatggccgagttttaattatttggagaaacagaggtcgttcatgtcagaatgaataattgttagcaagtgcaaacatcttctgggcatttaccatgggctctggtctttgctgcttaatgtttgacattatttcatttaaccccaacgaaaacagtgctgtgattcaggtattgttatttccatgtcatggagatggaaaatgagaccatagtgacatatacctgtaatttcagcactcagtaagcagaggcaggaggattgcaaatttgaatccattctgggatacatagtaatttccaggttaggctacataaagaaaccttgtcaaaaagaacacaaagaagggaagcaagaattaaatgttaagtgatcagtctcaagtaattagtagtatgtagaatcaaagtttaacaccctctttgtctgactctggaacttgaacttttatctactatccctctgcacatgagctttttacacatagtaatgttctgactcacactactcaaaaccaatgaccatatgatttcctattgagagtttagttaagttcatatactgaacacacaacaaaacttttccgtattgttaattcaggtagctgagaaaatctggagttcagaatggctttgtctcagaatgagtatgcttgtctcaataagtgatgtcttgcattgattctgtcttcctagggagttcctatgaagatgttaatgacaaagatcaaaggctaagatgcgtctggaaggtgctgggatgatggcacaggaacttctggaagaattcattactggataattagaaacagccagttagcccatttggccttaagttgactaccagaggaatgtgttctacttgtgctgagacagggagaagggttcaattgcagatgcatttcatattatgtggagtaggaacccgtctggttatccttccacatcccacccactctacagtaacacaagagcacagaggctacatttctaggagtgcaaacttctctcttatgaatatgtatttacctcttttaacagactaaggctttccaaagacacgagtgattcactggaacctgggcagggctatttaagtcttattggattgtggcgctaagtgtttccgggctaaatacagataacaagcgacagtagttcagttgcgggtttagaaatgctgctcaactagttaggcagggcagttggaagtgtcttaaacgctgaaatgaagtaccggattctatgcgggtagactttttaactgaaagatgagatactaggtttagaaggtcgggttattgtgaacttgtaatggcagtgcaaacccgaaggcagaacttaagttttcttcagctaaaacgctaaaaagcagttaattgtacttgttaaaacctcaaactttcaattctttttctataaaatgattcagaggatcaggttgaaacaaatatgctctttggagccattcaaggaatattataacaatacctgttgtacgatgtcagtttgctgctgatcctgacccttcactctacgcacaagtgactatctctctttttagacagtgactgattaacctaaaaattcctacaatataactacagctattggacctccttggtactcaacgagcgtttgttgaatgaatgaatacctgctggcttaggttcttcgtggggcccagattcagccttccagttcaggatcctgtagaggtcaaccctctcccgccagtgtaaaccggcgcttggcccgtataagcatagttctcactgcggaggaacttgacctgctctaatgattggtcataggcatctgaagatagagcttttaagagaattagggccaggcaggttaagtccctggaccgccagcttggtctctaagcagattctcaagctagaccactgagggggatcaaagagagccggaactctctgggaagcgtctctgtccgctgttaaacctctccccttgttccggtcacaaatctcgtcgccagagcaacagtgggcgtcaacaaacgcagggcggaaataaggctatagtacacgtctccagagggggagataggccctgcgcaggagcattaatttatttccgtttgtagttctcagtctggatcagcagcctgcgtctgcgcattaattgtgacgtaccaatgctggcctttatgccggagccaattggcccgccggtgtgggcgtggctagggcccgctaacgcgcacgcgcgagccacatagtctgtggtcgtccggtatccgaagtccccgtgttcgtcatgtcggcgtctgtggtgtccgtcatctcccggttcctggaggagtacttgagctccactccgcagcggctgaagttgctggacgcctatctcctttatatactgctgaccggggcgctgcagttcggctactgtctcctcgtgggcaccttccccttcaactcgttcctctctggcttcatctcttgtgtgggcagcttcatcctagcgggtaatgattctgtaacctggtcataatgtcccactttggcgcgcagcttcgtcctcacggtaccctttggtaatttgtagaaggccgtcgtctgtgaagtcacgcttacttcttgggatccaggaagcaggctcagaaatgtcacgtttctaatgcctaacaggagttgaaactgaatatgtaaagaaatagctcttctggtgttcgtcgcaattaatacttctttaaggaaaaatatcctaccttgatgaaactttaacacaaatttaaagttggtagagctttaaattaaaatgccaagctgagccatttctatcactttggcctaatccctgcttcatctaggagaagactttagtgatagtataggaatataaatattagtgactgcttgtgaggaggtaatccaattgatgctggctttttagttgcccctacttatttctgtgcataatttatgtgctttttctctttaccctcaactcaatttttattcacacaattgtgtattagctcttctttcgggtctacgcatttaataaccttacagacttccaggtttaatgaggattgccgccatggatttcatctgaagtctgacctttcttgccccatggaactgagagaatactgggaacaggtttggctaaagaatgttactaccaaatgtatcatggtcagtcagcagtgttttgggggtttattagcaattgttttcctcagtgaattacagctggtttgggcagagacaaaatatagcattggacttgtttggagacttgatttagagtcttaacataaacctcacgtcacatgtacacattcacattgctaggtcaggcccactgggaacaattttacttttcagaacttaaataggtcccagccgacttgtgccccagtcagagctagagctgcaaagtcagcttattcagtggtcatcatattgtctttgggttttggtccagtttctggaggctacaccctaaccatcaggatatgttagcaccattagccaggtctgacaaacctctctactgtgcccaatactgttcccgacaactttattaaccagccaggagaaagcatttgctgagaacctcttacttatttagcctctggtgatggaagtgtaggaacagggtggggctaacatctgatttaagtaaggtctctcctgttgaagccacccatcttcacaagcctctgagttaagtcctgacttaccagaactacatagaaaaaaagtgatttgctggaaagttaggttagtgtgctcacactctctctttcatcccatctgtctttcctttccttttcttttcttttcttttctttctttttttttttctttttggtagatgacttttgctttttttttttttttttttcttttaaagatttatttacttatgtgagtacattgtagctgtcttcagacacagcagaggagtgcagaagatcttattacagatggttgtgagccaccatgtggttgctgggaattgaattcaggacctctggaagagcagtcagtgctcttaaccactgagccatctcttcagcaccagccccagccccagccccagcttttgcttttttttttttttaaatgttcttttaaaagtatttttgtgagcatctttgtgtgcatataatgtattgtaaagtgtcattatgtgtcagtgtgcatgtgtgtgtatatggaggtcaaagagcagaagtattcattggctagactgaactggctggtggatagagaactctggggagggagtgtcttcctgttgtatggtgtcttgtctgcctctctccaactctctgcaactccacagttaaagatgtgccagcaaaccaggtccttatgcttagaggcaggcactttaccaactgaaacatctctccagctcctaagtcctgtttttgtgcctgttgaggctgaaatgatcaggtttcagtgggaggtatatatatggcttgttattgactagactgcttagcaaaggaacactgttagtagtgaggtcattattaggagtgagggcattattattagtgaggccattattagtgaggacattattagtactgaggtcattattagtagtaagattggtgttagtagtgatatttacaaatcttttaggtaacagggaatagggtgagagaaataaaattgggtttaaggaaaagaaaagggtttctgataattcattgttgctgaagaaagttatcatttgcattctcttcccttcagtgaactcagggtattttgtcactgagctaaattctcagatccattcatcatccacccacctatccatcctttcttttttttttttttttccttttaatttctttttttttttttgagacagggttttaatgtgtatccctgccttgctggaactgtagattgggttgaccttgaacacagagatcagtgtacctccatgttctgagtgctggggttaaaggtgtatcagcaggccggctgccatgtttcttttgacagcattcattttactaagtccaacttcttttgctaggccagatcattgcctggtaacttgttttagtgaaaaattagaaatctggctgtttggccttcgctcacgttgttgagacaggggacctcaggcctggtgtttttgacttttctgtggtctttgggaagagcctggaaggggcagctttgctgagggaggttatagggaattctgggggaggattttgaaagaccaagtggcactaatgctggagctttggcctatttctgtaggagatcatctgagaattaacagtgacagcacaggcagatagatggctcagtgggtgagggtccttgtcaccaagcctgagcatcacctgagtttgatccctggggcctgggtcgggaggagagaaccaactcctgcattcttctctcacctccacatggacacactcacactaagtaaagcgtaaatagcatgcacacctgctgtccaacaacagttctctttttggaagtgaagggcagacttgaagttgatgttagttgcatgtcctgggggaggaccctctttggattgagtctcttcatgcttttggctggttgtttcttttgcatgtacatttgctctttagaaattggttaggacactgtaaatgagtttagaatgctggcatcaaacatttgaatcctgaaaagacacaatgctgtcttctgtttcctcatggctgggtggcttatttagggtctcaggaagggacttgaggtgagagggcacgagggatgggcttattcagcagcggatagtgtagtgggtttttaaaggacctcagggaagtcattttcctatctcagccatgctcagcagctgtctgtttatcttcctgttagctatcactagaggaggaacatctgtcgagtcagagttaacattccagtgttggtagtctttgtagtttccttttgtacctagctgggagctgctcatctcaagaactgtttagggagattaagtggcaattagttaagtctgtctttaaagtaagtcttactaggcagacacgccaccactgagcctcgtccctagtctgtgaagtcattgttttaagttactttacaactttggttcgtccgtactcaagcttatggaaacagttttatgggccggagagatggcttagttggttagagtgcttacagcggtgagttcagatacctagcaccaatgtcagaagctaggcatggtacctatgcctataaccccagtgctggagtgggggtgggaggcgcagggcagcatctaagaggattgctgagtcttgctggctgccagctcaggttcaatgagagaccctgtctcaaaggaataaggatgaaagagagcaggacacccaatgtcctcggcctctgaaagtatgcacacacaggcacgtgcatctggacacacgtgcacacacgccatacacacatataccacattcatgtctctgtctcacacacacacacacacacacacacacacacacactcacacacacactcacacacacacacacacacacacgacgacatttacaaagtaaagttttagtactcgcagttaagaaatcacagaggagtttgcatttgagagacacggagactaacatggagtgttttttgtctcaaggaagccattggcttatgtggactggggtggagctactttagggagtgtcctttgatctttggattcctctcagctactgtccaggaaattgggagtttgccaacttcgtggctgattgtctggtttctaaatgtcctatccatcacttttttattctcggtgtctcaggctgcttcctagctttgcagcccgtgcgtggtatctcttttagcttgatctgatttgcacgcctgatcatgttacttaaccaaatttgtctgtggtttccaaagtagagtttgtgttttgtttagtttgtttgttttttcaggacacaggctcttttgggagctgaccttgttaacaccaccctcttcatcattgtctagtgtcagtaagtcatttgccattccgaggttcttgtccctttctttactctgcagagcttggttcacatctgacccctctcagttcacggttgttgactcttccagtggacccagggctctcttgtccttgcttgcgtgtgtatgtgggggatgaggtaaggaagaggagaggtgggactcttccattagcctgtatttcttgtacttgtctgccctctgggaggcgagggcaggcgctttcatgcctgcatccttgtgcttgttaaattgtgagcacagctgtcttaatttaaggaagatggaggactgtttgccaggttctgtgctggtgtgctgtggattcagctgtgaggatcacagatgcggctcctccttaagagtcttacagtctgaaggaggatgcagacaggtctctgtggaagtattgctagtgaggacaggagcctgatggctccctggccctttcagtgctcatgcagtgtgtccctcgtgtgtccacttcccagaatgtgcttcgtaacttctcacagttttctccatttctttgcctgtattcacagtttatcttatatattagttttttactagcaaagtgagagtagccaggagtctgttcatcttctagtggctcacacctgctcctgtgcctctgctgtttgattccccccccatgtcagctcttgcacttagatacacagaggcaccagtcttctcttggtggctgaacagcttctgtggtgatcccttcattcagcattgtgggttttctctattgagtcattctcaagttttagacttgctctaatattgtctaatcttacagttgaaccaggcatggtggtgcatacttttagtcttagctcttgagtgaccgaggcaggaggatatctatgaatttgaggccaggctggtttacatagtgagttccaggccaaccaagaccctgtctcaaaaaggaaaaagaaaataagttccagtcgatcccaggcactgctagcaaccatcgctagcatcttttccttctcccttgttgtagagcttcttgaaggagtagttgctgtgtctccctttcccccacatatttctcagtgctcttgtgctgtggcctgtccccaccacttcctcaaactattttcccatgtggccagatggagtagtcatccgcctcactttacctgactgctcagcattagtatttagctcaaatggctggttctttctgagtgaaacactcgcttctcagcactcttgtgactgcctcttcctcgttcctcctcacctcctgctggcttttccttcccactgtgctgggcacttcattttgtatttctttccataggtgaatttttttttttttctcaacagggtttctctgtgtagccctgctgtcctggaactcactctgtagaccaggctggctttgaactcagaaatccgcctgcctctgcctcccaagtgctgggattaaaggcgtgcgccaccactgcctggcaccataggtgaatttaagttctgtatcctgtccagttggttcaaaataccaaatctacttgctgacgtatttctctttgatgtctcttcaatcgctcatgtttacatatcccaaatggacattccccttacccttcttcccagccatctgcttctttaccagccagtgtacagtgtcagccctgggtaggttgttcagccagatatataggaggtctttttgatctcataatttctctcaactcccacatccatttcaccagcaagctttgtcttctctggaatataggctgtctctatctctgtttctgcctacttttaccaccttaaccctgagctcttcatttcctaagtcattcatctttagtcctgcaaaccattctttatgttgcagtctggccttttaaagaatgtgagtcgttgttgcttggctagtcgaacccttgactgttgcttcattgccctttggctaagtctagactctgtcctgagtcctcaatatcagtgaccagatagcttggaagtggcaagactgtttttactatctgtattgctctgccccagatctttatgtgcctggctttttagcctttaaatggtctttagtagcatttttaaagacacgactactggatacaacagccttctagtctccttatcttgctacattttctccacagtgtgtaccccacacagaatttccttgttggtttgcagactggagacacttgtttgtctccacggactataggtccctcgggagccagagtcctgtatctggtcctgccatcttcccagcgtctagagtgatgcttgactcatagcaggcgcttgttacagcttttgctaaacacatgagcctttaaggagatgatgagcagaggtgctggatgggcagtcaggaggctgtcggtttccgtctctggaagtcctcagggagacgctgaaccctcatttctggagcactttctttatctgtctgtgtccaagccagctgagggatatggcatacttacgagtgacacaggatttggagggttggtggttctcatgctcatcaaatccaggacctggtaagtgtccttcagacaatttcccaggctcttctttggaggctgcttccagctcacctgtctcccaccacttcctggacattgctctagtttgctttctatggctgtgataaactacgaccagtagcaacctggggaggaaagggcttatttgacttacatggcatagccctttatcaagggaagtaaaagcaggaactgaagtcaagaccatggaggactgctgcttactgcttgctcaacccgttccttacacaaccaggaccacctgtctaggggggatagttgcactgcctacagtgagctgggtccttccatattagtcattaattaggaaaatgcaggagggatgactcagcagttatgaatacttttatagttgcttttctagaggacccaggttcgaattgaacctggcaccttgagggggtttgacatgctcttctggcctcctatgacaccaggtacacaagtgatacacagacttacatgaagacaaaatacccaataaataaaataaattttttaaaaggaaaaaaaatgcccccaacccccccagcctagtctgatagaggcaacccaaagccccacatgcagttccccagctgaggttctcatttcagctgactagtttgtgtcaagttggcaaaaagaaaaaaagaaaagaatccaactagcataggcattttatgcaccagatggggtatttgaagggctagagaatggctcagcaattcagagtgttggctattcttccagaggacccaggttccatccccagcacccacatggtttctcacaaccatttatgtaacttcagttccggggtatccagtgctgtccagtaacctcaatgggcaccaggcgcacacagatgatgcatgtatacacatgtaggcaaaacactcatacacatacactaaacaagtttttaaaaatggggtgttgatctcaatggcctctgaggtccactggatagttgtggggttgacttgtgcactgtaacttaatttgagttgttatagtcattttaaggtgactagcagctcatgactgtatccactggcacaaagcttttctcttgtcccctcatagttactccagacactacctcattttctatcccagtgctgttaacagttctgtatttatttctctagagtttttgctagctgacaagtaagtgatagactagatgtaaagtaaatatgaacatagtaattatatataaaagttacagttttagaaagagcagtttggggcccacggcagagcagctgcagaagcaggcagacctgagttaaggtcccagcactccaggtctgtcacccagggtggaggaaggggaaggcaggcagaccttgaacctcattggctagccagaccagggagtctaagcttcaagtagaatgtctgtgagaatccatgagttcataagaactcccttctcaaaaataaggtaggtggactggaaagatggctcagtggttaagatcacttcctgctttcagaggatctgagtttgattcccagaatccacatccaacctccaggaatgccctcgtcagccttttaggagcacctgtatacacaagtcatatagacatggcacacagtgaagtgcgcgtgcgtgcacatacatgcacacacagatacacagagacatacacacatacacagagacatacacacagatacacacacacacacacagatacacacacacacgcatgataaaaatgaatctgaaaaaaattaggtgggatgtgaatgaggaagattcctgaatttaacctctgacctccacacacatgtatgtgtgcacctacccttatgttcagcacatatgaacatgtacatatacatacacaaaatacagacatttacacgcaatactacagacacatacaaaaagagagctgacatgagttagtgattttgactatttttttcactcagtgaaagtgaatagctttcttgttagtgtatagagaatttcccttagtctgaataattgcataggatttcattgcaggtgtgtagtatgatttaattattccccttggtgacatttggagcatttctttttgttttctttcaattttgcaaacctactgtgttttgtaaaacacattcattgttaaaaggtaaaaacattttaaatactaagtggtattgccagtggctttcccccagaggtggactagcctggccttttacagcaaggctttaagtggttttcttactccagccagtgcccttcataaaggtcagtgcacttccgaagtgtgtctgtgcttaggttgatgggaactgttgccatggtgatgaactctggaggactaatctgatcattctgtcttctcagtggattctttgttaatgttggagtggatgctagcctgaagcaggtgcaataatttattgaagccataaaaggtgtttgagcagagaatgcccctggagctgcttttcatgtctgggtgactggctgccgcctcgttagagacttcagggatacagaaacgtgggagtagagatcactgtcaagagtcttgtgtgttggatcttctgttgtcttttgtgacaaataaagccactagaactttaccaaagacagtgtatctacagcaggaggcccttgtggaccttcagctgtactcctgatctctgccgtgtatcttctggtagaagatgattaagatgctatagggtcatcattcatcccagtcttcgttactgctgcatctgtagcccgtgtaggcataattagacaccttgaagtcaaccagcttaagagtgcttaggcagttaggaggtgtgagtaagcttacagctttagcacctctgatgtgttgttttccccctttattgttcctttaataacggaaagttaagattgtaaaggtatataattttatgagttttagttttctatttacttttttcagtttttagttattggatgtgtgtgtgctgtcaggcttgtcggcaaatgtcctccccagaaagctacctcacaatcttagtgtgatattttttgagacagtgtctgatgtagctcaggttccccttggacttgctgtggacttggagatgaccttgaatgattcgcccttacacctgctcctgcagtgccaggctgcagcggtgcagcaccatacctagtttggggtgaggttttagacactccggtctaactatgatgacttggatcaggacagaacgttatcactactgtacaggtttcttgcattttaagccatgattctgtcctgagagatgaaagtcactatctgtcttatgctactgtagatttactcagcctattttgtttatttgtttttgttgtcttgactttttgagagagtgtcttaactctgtagtccagactggtctccgaacttgtggctgtcctccttcagactcacgttctgggatcacaggtgtggaccaccaggtctggctggtttgcctggtgttaaggctccttatgtatgaatcatctagtgtgcactctttatgtttgagttgtgctgcatagcgtggtgaattccacctaacttggatgtagcagaagttccttttcattgctgtttagttttttcttgtctacatgtggtatgtagtctccctgtactgttaatagacattaacttttctagatggtgtacatacatcacagggatcactcctgtgcgtgcctcttggctgtggtgctttcattttattagagactttccatcacgggatatatttgtgtattgattagcaatcatttgttttatatttctgaataatgacttttgtgttttgtttcttacccagtttgcctgagaatacagatcaacccccagaacaaggcggacttccaaggcatctctccggagcgagcctttgctgacttcctctttgccagcacgatcctgcaccttgtcgtcatgaacttcgttggctgaactccgtttccttactgtggagttggagattggcggagcgtaagtggccatcccagccttgtgctgctgtgctgattccagcaggtggattagatgggctggttctggtcctggtcggccgagttcccatggtacagtagggtgtttgcaggcttgcccagcttcagtgggcagcagtttcatcgcgctcgtcagcctgtgggttacaggtgtgctcccaaaggcttttgaagaaagataaactgcaagttttgcttttagatttgttcttgagttttttcccaattctgattgccattgatgttaaatattaattatggccattgttgcctggtaggtactcagagtagtgtgaatgtatgacagctgcttcttaggaatgtgtgccctgaactcaaatggtaaagttggattaacttgtgagaagacttagaaccagacgggtagcattcggtttgtttgcttcatcccttgttaagcacgaagccatcttgcccccccaaacaaactttacagaattttgatagggaaatgcaggtaggcctagatctcttttgtagagctgaaaattctctctgccctcccttcataggttgtgtgccctcctctccactctcccgtcttgtctcagttacttcattaatgctgtgacaagacaccatggcagaggcagcttgtggaagaaagtgtgtaatttggtattcattgctgcaaagagctagagtctatggctgtcagggtggggagcatggcagcaggcaggcttggtgttagggcagtagctggcagcttacatcttgagccacaagcttgaaacaaagctaactgagagtggcatgggcttttgaacctgaaagcctactcacagtgacatacctcctccaacaaggacacacctcctaatccttcccaaacagttccacctactgggtggaagcattcaaacataggagcctgtggccattctcattcaaacctctacatcccagaagcagagtcttaagcagtgaaacggacatgatttttcccagcacataccaatatttttcctttgatgagagaaaatgagccgggaacaatgcagttgcttcccagatgcacaggcgcacgatgtagagtatcctctgccgcttgatgtttggccctatgcccatgcaactcagggacgaatgcctgtgcttttcctttcctttgcacaataagatttcgtactattgcttccaggtggcaagagaagagaatcttaggaaataataaccttttgggagaaaatgtcccaggtccaccctctttacatcactacatggaaacctgtgtgttggtactgagagcctcagaaacctcacacgagaaccagggatgcatggtgtgtgcagaatcgcccagtcccagattgcagtgcccgtcactttgttgaaagtagtaggctcctagaaaaggtggggaaacgctcttgtctggggatcgccctgcacattttccagaggcctttgacccgatacacgctagctaccctgtggtcccacacatctgtctgtcccatctgtgtggttttcattcagctgtgtgctctaatggtcacactaactcagaaggtaggatgaaaaggaaaacaaaaacaagaccactcagtgcgcttataaaacactcattcctaagacactggcggtgttgatgcccttattctgtgaaatgaattacggggctatagggcagcacagttggggctagattctcatgttgctgcctaacattctccttattttccagttgacagatgggcattttaaaaaatttaatgaatttgaaggtggtatttaaaaccaggaagaaaaggcatatcaaaagaaaatggcattgcgctgtaaaagtcagtgtgacttaggggggccagtgaagggcagttgcttcaagtggcgctcactgcatgtcctacaagtgcttgtgagtatcatttgactttcagatggcctcaagcaggcgagcctgccattcccatttgcagactgggcactgagagacccagagagcacgaggagaaatctttcatttgtttttgctttgaaacagactctcgcttcaaatcagttacgtactgaaggatggccttgtgttcttgaccctccaacccttgcctcccacgtgctgggattgcaagtataggtcctcagttcctgggcccaattttagatcctttttctaatttaaaaatttttaattttaatttgcatatatgtatatgtcttgtgggtttatgtatgttagtgcaggttcccatggcgaccagaagtgatgggtctcctggagctagttataggcagttaggaactgctcattgtcgtgttgggtaccaaacttgggtcttttgaaagaccagtttataatcttaactgctgagtcatctctccagctccagtttcaagattgttggcttgtttgtttgtttttgtagacagggtttctctgtgtagttctggctgtcctagaacttgctctataccagcctagcctccgactcagagatcctcctgtgtctgggattaaagatgtgtgccatagtctgaccggtttcagggtttttaaaagaaaggatgaaaagggaaatggcgcaccattgggttgcatttggggagttcacatacctggcgatatgggccatgggactggggaaagtgacgtgggcaccaagaataacacaacgttagtgtgcttgccttcctggatggaggttgttgccagaagcctgggctgaaattttgttagttctgcttttttaatattatggggagagtctcttactatctttaaaatttcgtagcatttaatcctagctagtgctggaaggctacctttaatcctagctagtgctggaaggctacctttgagctgacagtactgtttattactaggcaattctctttctttctttttttaatttatcataatttagtaatctagagaattaccttgggaagggactcaaactgtattccttttttccatctccatctttatttttaattaattaagagacagggtctccttatcccaggcttgcctggaacttgaaaaaaaaattgttgtttaaaatttattagattttattgaggggggaggagctggtgtgtgtgtgtctgtgtgtgagtgtgtgtgtgtgtgtgtgcctagaacacatgtggtgaacaggactgactacctctgaaagctctctccaccgtgtaggtcctagggatcacactggggcatcagcatccagggaagtgcccatcctccctgagccagcccacttgccctggactttaaagaaaaaaagttttaatttattctttaacaattttacacatgtttgtggtgtattttggtagtaccgcccctacctagtaccccaccacatgctcttttcaaattattttataacctaccgagtccatttagggcttcctgcatgcatatgggcatggggccatctcttcagtctagatggtaccctctgcactctgccgccatctagtggatgcacctttcctatgctgggagtggatcacaaagcataggagttgtattttggtggaacaactaaagctagttcctttcccgtcatgggagggcagcaaaggcccaggtaagcgtaaatgccgaccaggggtttctttccatcctggctaggagacggcagtgctgagctagggatccttagcaggacccaggcttgtcttcctcacctgtgctgataaatgcaggatttcacagggttccctttgtcagtgtctggacttggctttcatttattctagaccctttattgcctccagctcggagtgccccctggcaatactgttcagtgtttagttgatgagcgagtgggtcccctaactgtatctcggtgcctcagccctcagggggctgggaagtcaggtaacttctttatgattggtcttaatagttcttaaaaagcattaattgattcttttaatttgtggctgaattattctggttggtcttttgaaggcagagagctagacagatgtagttagatttattcgtgtgtgtgtgtgtgtgtgggtgggtggggggggggtctgtggatatgggcagcatggcagatgatccaaggacaatgttcgggggttgctctctccttccttccaccgtgtgggtcctggggatggagcgcaggttgtcaggagtagcaggagtacccactgatccagctctttttttttttttttttttttgagatagtcttgttnnnnnnnnnnnnnnnnnnnnnnnnnnnnnnnnnnnnnnnnnnnnnnnnnnnnnnnnnnnnnnnnnnnnnnnnnnnnnnnnnnnnnnnnnnnnnnnnnnnnnnnnnnnnnnnnnnnnnnnnnnnnnnnnnnnnnnnnnnnnnnnnnnnnnnnnnnnnnnnnnnnnnnnnnnnnnnnnnnnnnnnnnnnnnnnnnnnnnnnnnnnnnnnnnnnnnnnnnnnnnnnnnnnnnnnnnnnnnnnnnnnnnnnnnnnnnnnnnnnnnnnnnnnnnnnnnnnnnnnnnnnnnnnnnnnnnnnnnnnnnnnnnnnnnnnnnnnnnnnnnnnnnnnnnnnnnnnnnnnnnnnnnnnnnnnnnnnnnnnnnnnnnnnnnnnnnnnnnnnnnnnnnnnnnnnnnnnnnnnnnnnnnnnnnnnnnnnnnnnnnnnnnntggccttcattgtaatctcttacagctgttaactttcactaatacagttatgatgggcactgtgctgtggactccattttggttcgagttctctctctctctctctctctctccctcccttcctccctccctccctttccctcctccagttgttactttttattcatattctcatgggtgactaaacattaaagttcaaaataaaatgtccagtgttacagaactgtccatctataagatgcttcgtcagcaccacatctttaggattcctgtgtcttccacatgcaccttatatcagtgcatatagttcccctgcctgccctgtgcacggggagacagatagctgtgtatgtgcctgctttgaacctgaaggaacttggcctccgcaaaatttcagttgactttagtccttggtactaagtgactgagtgggcagttaatagtgaatgtttggatcctaagctctgatattcattgctctctatttttaaggacttttgagtaatgattatatatatatatatacacatacatatatatatatgtatatgtatatgaatgattatatatgtatgtttatgtatacacacatacttagaggattgtgtttgttaaaatattaaacatgcttaaatgggaaaggttacgagtggtttataagaagggataaagacagataacccaggtgtttctgcaaaggcggcatcattaccgtggtacaggagagaagtaggagcatgcatcttgggagagctgaggtgacctcacacagcacctgggtcctctgagtgtgtgtgcgtcccacccacaacagtggtcattggtcacatgattaatgttgcttggtggacttctgaaaagggactcaccaaccaaggaactaagttttaatttccttaatttatttatattttatttttatcagacagactcttctgaatccttagctagccttggactcaatccatagttaaggaagaccttgaacttctgaccctcctgcctccccaaggcctgggactgcggacgtgagccagcatgcctgacactgtgggctctgggtgttgtgatgctacagcatcctgccacctgtccccgcagccctgcctgcccatgatttaaggcggttttaaccagagttaaatacatgtgtgtagctgctgggtaatgtgttggacagaatagctgtggataaaattcccaagctaccaagttgtagatttatcatttctaaaggagaggattggcttagttgctttctggagtgtccttcattttagaagttatgatctgtgccttgtagtattagagtgattcaacagtgctctgctctcgggagttgagcacagttgtctctgatttatatcacccctagttccagctctgattgggtggtcaggatccagggaagggcagcatttgatcgtatctgtccaataatgacagtctagagaaggttctgggaaagagcccacagtcccaggagctgttgttattttcatctatagaatgaaatatagaaaatgtcattttcattatttcttatattttttcttgctttctattagggtgattagaataggtgggtcagatggtgctgtttcttcctgggggacagactggggaccccctcacctctctcagtaggtgccttccattttgcgtgtttcagtgacatcagggaggagattttgaggcagtttttgatagcagcctttattctgcttgcagatataaaagcattcttgtgagttcctcaccggtccattgtgccagcatttcagaaaccccaaggcctctgtttgagcacttgccaagtttgtcctcactggagaagacaaaacagnnnnnnnnnnnnnnnnnnnnnnnnnnnnnnnnnnnnnnnnnnnnnnnncatgtttttagtatcagaatccaccctgctcttagcagcagcctggccccactgcaggcattgctcaccttaacccaaagtaacttatgagacgtgagaactaaattacctcttcacagacctgactctttctgaggttctgagaagttttgtccacgttcttgagtctgtcctcaaactgaacattagtgctttgaggaatatgagggccaggaaggtgagtggctggtggagagttaggattggtaagtcaagagctggctgccagtctccagcacctcaacggcctttttttccttttctttttgtgagcttggaatttctgtgtgagcatagtccttctagaggctactctcatacaacgcttgtgaaacactggccatgttctggttattgtagcctggtctaaacactgcgatgcacttaggagtgcggcagctgtcttgtgggttgagagtttagatggaaggatttgggacatgacacacctttgtgcttctttcaggctcactctttgacgtcccctggatcagcattcttgagctggcagcttgttgcacatggcttcttcagattcgtgcttgactacgagtctcactggttgtgaggtggcacgtccaaagaactcccttcgctctatcggaccaactccacagtgtacgtctgttaacacagaatctgcctcccctcactgtagcccttactttccatattaaaaacatttcagcctccaagtgccattggttccttcatgtttgtgtgtccgtttccctcggctcagtgcgctctcatgacttgctcccagctgtgactcttcacctgtgacccttcacctttgttttcattaagtagttgtcattgctgacaacctggaaaatggcagtcctttgtcctttgctcggtcaggcaatcctttattaatccttcattgtctggaacggcaccagtgaacacttgtcagaaactgacctgtgtgctcttcctgctacgtccgtttccataagcttctgggagagtgaaatacatgtgtgtctctcgggcagtatagaacaagtgcaaagtgtgtgtgtgtgtgtgtgtgtgtgtgtgtgtgtgtgtgtgtgtgtgtgtgtggtgagagagaggtgtgactgtgactgcaggcaggtgtctctgtgtgtattgcattctgtgtgactctgtatgtgtccgagaggctggctgtgctgcctgtggcatgtgactggcgtgtgtgcgcgtgcacgggtgttgatttctctcacattgtttcccaaagctccctcacaagccttggtctcacgtcacagttgtcttcagagggtccagttctcctgaagtaggtcaggaaatgaagctcagatttgtgcttaagaccataggtcttcacaggagatcactttaaagacaaagccggagtagagtagcgtctgccggctgaagtctaggcatcctgtatccagtgagctctgtgtctctcaggagcagtaagtttgccatatatggggaacagccctgtcgtgttccctgaagctgattaccaaatgacccgtgctccagaagccctcccgtaggaccgcacgctgccataggctgaggaactcacagttctgttgcccgggtcacactggatcaaatcagtcttgggtgtagctgactacccctatcctggatgattgaggcttgccattcagtgggtagtcggccattagtggtactggccactgttggagctgttggaaaaggagactcccaggccttacccccaagcgacagaagcaaagctttgcattttaacacggtgccaggtgtggtggtgtgcacccggaagtctgagatgcccgcatttccagctctgggtgtatcctgcaactacccggaagcttaacagagcttgagcctctccattctttattagctctctgcttagctagacatactccagagtgagttaacaagccttttaggaatggttgggttcaatataatgacaaaacctggcaggggtcctgtgggccaaggctgagcactgaggagaagttcactaggatggctgagcgatcagtgtgctcgacactcgtgcagacatcctgcggctttccccggagaagtgggtgaggtttactttggattcaataagcagatatttcagatatgaaaagcaatcggactttgagagcaaaggaagacgtcacaacaatacgcgtgaagatttacatttctcgcagtggcttagagccacctgggccgggtactagtttccaggcgcagatctgcttttgtctcggggttgtgattttccccttggactagccttggcggcaggcgtagcttgctgtgagtctgtaccatttacaacagtacaaactactttcaggggtcttgagttcaaatttgaaaatgcaccataggtttgctgtagactttagttagcttgctctgtggctctcagttccataactagttgagttattcctcaactagggaagggccttccacaaggctccccgggcagaggggttggttttgctgactcaggtactgtatgggctgagggatggatgtcctgctgtttcctgcagcttccagctcacacctcctctgtgtgtgtgtgtgtgtgtttgggggggggttatttttatttcctgtgttcaatctgtggggctgcaagccatttaccacaactactgtacattgttccttgctcggcagtggtgggaaacagccctttgcaccctctgcctacacacttcctgtcaccacggcatgcaaatgttcctcctgcttcctctcccggcagcctgcacctctgctctttgatcacgtctgtgatcttggcccacaaagcgctcttgttatgattgttggaacatacttgggggaagtgacagagatttgttcccttctttgggaaagtcagcaagccagccagcatcagctagtttccagcacctggaagctgctagctcagttgtagctctggtgggttgtggactggaagtctaggctagtgtttgggtgcctcatgacttaagatttatcttagggttttcattgctgtgataaaacgccatggggtggggtggggggtggaagccccatgggaggaaagggtttgtttcagtttacagctgaaatccatcagtcggggaatgggggaagtcggggcaggaacgcaaggcaggagctgatgctcaaaccaggggtgaaagctgcctgctgccttacaataccttgctcagcctgctttcttatagcagggccagcttgcccagggtggcaccacctacaatgggttgggctttccctcatcagttactaagaaaatgcccccacaggcttgcccaccaatctgagggggacttttttcaattgacatcccttttcccaaatgattccagactgtcaaactgacatgaaaactagccagtataagacgatagctaattaaaaaaaaaaaaaaagttttccctgggtatgtgtggtcctttaccttgaataagaactttagtgagaaagaaaaaagtgagaatttctgtcagactagacagaaatattttacttacttaattttgaatttataagtctgagcacacaattttttttcctaatgtgggcagcccggtattgtggaatgtgctttgcatgatgtaaagtgttgaattgagactgtgttccgctacatattgtcttttgaaccttagaggaccctctgtctgtacaattctgtaaataattaattaggtgcctgggctgtgcccagtaggcatgggctataaagataagaagcagcctcgctgtctaggggtgagtaaacccactcatgccctgtgtgtctcgcacggtatcaagtgcctgttcccatctgccgttgaagttctatgatcccgtgaggttctctaatctcacagggatgtagtctcctttctccaagtggggaggtggagcgttgggttgccagtgttaggatgtgaatcttctttctgactcaaagcatttatttgctttggatgagctaatgactaatgagtctgggagcggtgatgcttcacgcatcagctacagattcaccggccctcatggaaggcagcagaactgacatctctcacatgatgcttcctccctcagcaccatatccagccggacggggtcttgccacggacctcgctggccagtgggaggagagaggtcccactagggacccattcttgctgctctcacagggatggaccactttgctttaaaaaattaaatattgccgggcgtggtggcgcacgcctttattcccagcactcgggaggcagaggcaggcggatttctgagttcgaggccagcctggtctacagagtgagtttcaggacagccagggctacacagagaaaccctgcctcggaaaaaaaaaaaagaaaaaaaaattatgtcatttcccccttccctccttctccctttcatctacttccctcccctcaatactttctcaaattcatggcctctggcctttttaattgtgataggtgtgtgtatgtttatgcacacacacacacacacacacacacacacacacacacacgtatgatttcagagctgaccatctggtgttggatagctggttggggggcttctccctggggaagaatgtttcccactgtcagtgttgcttggctgctgcgctccttgtttagggttggagaatcccccctcacatttctaagacgcaatctcagagcacacttcctgtttctccggttcttacagtcgttgtgcccccaatccccttctaagatgttccctgcgcctcgggtgcaggagctgggttgtcgatagatccgctggagccgggcaccccaggatccacggtcctctgcctctgacagggtgtggttttctttctgtatgcgtgcgtgcgcgtttgtgagtgtgtcagaggacatcttggcaggagtcggttctttccttgtaccatgtaggtactaaggttcaagcttgggtcaccagggcgtcactaggtgcctttgtatacagagtcatcttgtcttctgattttgccttatcactgaacttctgacccacggggctggcaaggtggctcagagagtaaaaaccccttctgcgcagccccggtggtctgagattgaccccccccgccccccagcttccacgcagaggtagagaactgactattgaagttctctgaccgtcgcagggcaccgcgccacaccatccccgccatgagactgagcctacagtttatgcatctattatgctatgtattccctcagcaggggagccttgtccacccatgctccctggagtggacagggctcgggtttgccattctaattcagtcctaaagaggaaccaagtaagtgcacacaatcacagctgagtcactgaagcagaatgtcagaaactggtctggttaggggccctgcctagctgatggctgcacctagcactaggacttcgtgttcgctctgtttggtgggaaaccaaggcatttggactagtccaccgtgtttttttgtttgtttgtttgttttttgtttttgtttttttgtttttcgagacagggtttctctgtgtagccctggctgtcctggaactcactcaggagaccaggctggcctcgaactcagaaatccacctgcctctgtctcctaagtgctgggattaaaggcatgcgccaccactgcccggcccaccgtggtcttatataagccagttcgtatgtttcctaagttgtcaaagaggcagagaaatgcgctgccttggttcaggtttgtaggatcgaaggaggtaatgtttgctttgatgttgagcaagcacacactatcgtgactcgggattctagacgaggatgttgcccgctcatgtgatatcattggaataactcagccagggtcagcaaggagaaggaaggatgccctagagtcgataaaaatcatgtcttgcgccaggcatggtggcgcatgcctttaatcccagcacttgggaggcagaggcaggtggatttctgagttcaaggccagtctggtctacagagtgagttccaggacagccagggctacacagagaaaccctgtctcgaaaagccaaaaaaaaaaaaaaaaaaaaatcgcgtcttgcagttttgttgaccacagtcttttaggtttaccttgggtatttcctgcccagactgaccatgaaacagaccagttgctcccacaacctaaaccatgttatttgatccacttcactctcaagttctgccagtcccatcttacgtctgtctgtgcttcttccatctggtgttttctttttttttccttggttgataaatttaatgtggatgtttcagagaatggaaggaactggatggtttcaaagtggatttcaggagggcttcaaaactggaatcctgtggcctctctttttgtttttgtttatttctgtttatttgtttattttggagacagggtttttctgtgtagccctggctgttctggaactcactctgtagactaggctggccttgaactcagaaatcagactgcctctgcctcccaagtactgggattaaaggcgtgcgccaccactgcccagccctgtggactctggaagggtggtatgctcacatttccaggacaaacacaccctaggatattgtaggacacactggctggaggaggaatgcttctcagaaaacctgccttgaggggaggtgcctggagagattgtatcctgctactactggctcaaggaatcctacaatcagggaagcccctggggtgccagagaggagggaaaaaaatgtgtctcctcacaggtgatacagtgagaagcatcaggggggccatgggataccgtggggtcctgtggtcctgaaaaaactgtgaccttgcaaaagctggaagtcatggaaggagtaacagatgcgcgtgatagaagctactggggccacagtcacgggcgaggtgggggaccgctgctgagcgggggacctggcgggccccaagcctatgtgagcgccggcatcctcacgcagcaggctgcttttatcgcagcatgggggtgcatgggtgcatccgagcaagcgcgcaggattatggtccatcctttcgctcgtgctgccatcccactgctttgtgtctgcctggggatttcggttcgcgaagcattagcataccattatctcctcagacaacagggagagaaggtgggcatgcattccggtctccgtgtgaataatggaaaatggagagagacaggggaaagttaaatgtgccacgaaggacactgaagcttacagaccctgctttgcctgacccctgcctgcctgaggactgccaggaagatattaacagaggccataaaattacagccattacgtctgtctcccatgctcacacagtgcccggactgtctgtgccttgactttaggcaatcttgagtttaatttacacacactgaggtgcagcaaacccaggctttccagctggatgcattttgacaggcatctaccccgatgtgcccatcatccaggttcagatcaaccgccccgaattccaaacccttgttctcctttcccatcagtcctttctccctagagacacctagcatgtgagtacctgttatgggcgacccctttggccatttcttaaactttagttgtatggagtcagagtccctgaaacctgacacagtgtctgccctttaacaggtatcccgctggaagaaggccttcgtttctaaactacctgagagaatgttggtacaaagaggagaactgaggctgcgggtttacaggctacagagtgaagtcatggatcctgggcctgccgggccccatattccatctcctggcttccaacagggtagtttctttctgggtttctcttgtagctgggtctcctaaacctgggcaggcagtgccccctgctgcctgaaggcctgaccctagactctttgcaggcagagaggatcacacaagtctggagtccagtgactggcacagggcaggaccctgtgaaacagaagccacttgtcattttattttcctttggaaagagtttttccgtaggatgcagggattttctttatcccgaataaacacgccgagggagaaagccttttggtggagtactgctgcccccgtgtggctaccttaagacactacaacagagtgggactcccaagacgaaagtttttcaggtttcaggttctgcgacttcctaggaccctgagagacagatgtccactagggttatctcttgacacttaaatttcctcctggagtggaaatgagagcgaatggggcttcttgtggaaggtatctgttggggaacgagctttagctgtgtgtgtaggcagctgcctctttcacaacctgtccagcacaagctggactggacatagactttctcccttgaactaagtatatagacttgtctaatttgagggcaatagaggtcaggggagggggacttcttgggagtggagccgcagtgcctccccagccggctgctgtgaatgggtgttaccaccaagacctgcaagccccacccaatgtgctctccgtggccttcttttctgcacctgtggttgggctgcggtgtaacggcccagcctacctcttctgggcacgtggcccggagagatcttatctctaactctgtatttttaactcctctttccagaggatgtggcttctgcgggagagcttcaaagggggacctgtttgcccatgtcagcaacctgacgtcatggaagtgggaggctgttcagacccaaacacctggagggaagtgggaaactttttccatttcctgttctacttctggctattgattcactatctgaccagcttacccatttcagggtgcagctgtctgtgtgattcttggaggaaatcctatgccttgtgtgtctgtatgaaaggagacagctgtgttacccatgtggcttttacccaaagcagggctggcgatccttcagactgccccccaccccaccccacccccacccgtagccagtacatgcaagagttacagtatttgacaggtctctcacactcacctctgggaaatatccctcggggacccagacttcaatcttgtccagggcggggtgggctggatatagacttcctgctttgtaaaccggaagcccttcttcccacatgttgctcgaggaactaggtttcagtgggtttgtgtgggtcactggggaaactgaaatggacattaagtgacctttggccctggatgctggttctcatgtaggaccagagtctttagacttttagaagccagtgtttcctggtaactgtcctgcaggattcagtcaacagtcatgaggctaatgtgagtctgaactcttcaagggcgcaccactcaagctctgattattctaatagtttttgccaagctactctattccttgcaaaaccgagacagtggctcacctggcctctgttaacgccaccacattccctctccagctcaggtccctcccagtgactgtgttgaccgtcatggggtcatctgttggtatctgttgggtgcaaggtactgcactaggtatggaggagctactggtgagcaaggtattcctcctatccgaagggtcatctatagtcccttgccaacatgtcacttggtaataaaacaatattagatttgatatagacatgagctttgggagttggattttatggtataccccaaacaaaaatgagacaaaactaaacccttgaagcctcagggggcggcctgagtggtcagagcacacacctgtccagcctgcctgtttctggactgaactgtgactccagctgcactggacaacgttgcagaacactttccacagttctagccttggaacgtgaagggtccatttttttttctgccttcagagctggcctgcagaaagcccttgagggagtaagggcatttatctagactctagagatacccattttacagctggccctggcaaggagtttgctggggtatgggtgccttctctttgggagttggtccagactggtctgggagcagtggcagccttgtgaccattgtcatgtcttcaggtttcctcagtagcctcttccagactaagcagtgagagatccagagtccgacgtggaagagtctctgcctgttccccacacttgttcagctcctgtggagatttagcctcagctgtgggagaaagttcttgttctgattggatggcgatgaagttgactttgatctatcagtggcctcctgtctgccttgtccaggcctcgcttgagttggggctggaagctatctatattcacttcaccgctgtgggaggcccttcaaatccctcccacgtcacctcactctggtcctcaggtgacgttagggttcttgtgacctctggatgttgctctctggggacactgggctagcatggttcaaccgaggctgggcctctttcacgtttagtgaggaggtctgtctttgattcctatactaccttctaggcttcttactctgtcccattcccacaaggtcccccttcagcctctgcattatggcagccagtttttaggagcccggcatctcctcagccacccacgctttctttgcctggattttttttttttttttaatagaacaaagtgaattaccactttaggagcaaggaaaaaaaaaagacaaactaatttgccctaagttcttaatggttgataaaggcttgctgcactaaccttcccatgggc

SEQ ID NO: 224 - DNA, 638 bp, Mus musculus
cgtccggtatccgaagtccccgtgttcgtcatgtcggcgtctgtggtgtccgtcatctcccggttcctggaggagtacttgagctccactccgcagcggctgaagttgctggacgcctatctcctttatatactgctgaccggggcgctgcagttcggctactgtctcctcgtgggcaccttccccttcaactcgttcctctctggcttcatctcttgtgtgggcagcttcatcctagcggtttgcctgagaatacagatcaacccccagaacaaggcggacttccaaggcatctctccggagcgagcctttgctgacttcctctttgccagcacgatcctgcaccttgtcgtcatgaacttcgttggctgaactccgtttccttactgtggagttggagattggcggagcgctcactctttgacgtcccctggatcagcattcttgagctggcagcttgttgcacatggcttcttcagattcgtgcttgactacgagtctcactggttgtgaggtggcacgtccagagaactcccttcgctctatcggaccaactccacagtgtacgtctgttaacacagaatctgcctcccctcactgtagcccttactttccatattaaaaacatttcagcctcc

SEQ ID NO: 225 - DNA, 341 bp, Mus musculus
atgtcggcgtctgtggtgtccgtcatctcccggttcctggaggagtacttgagctccactccgcagcggctgaagttgctggacgcctatctcctttatatactgctgaccggggcgctgcagttcggctactgtctcctcgtgggcaccttccccttcaactcgttcctctctggcttcatctcttgtgtgggcagcttcatcctagcggtttgcctgagaatacagatcaacccccagaacaaggcggacttccaaggcatctctccggagcgagcctttgctgacttcctctttgccagcacgatcctgcaccttgtcgtcatgaacttcgttggctg

SEQ ID NO: 226 - DNA, 44325 bp, Homo sapiens
aagtaaaacattcccctggacatttctttcaagcccagcaagctattaattatggtcataaagttaattagttccccggacttccagttctacaggtctgaaaaacaggattactgggtccaggaaaggcccagttctggtgaaaccaaggctcggctgggagctgagtcattcttctcgtagcaactttttcttactcctgtcagattgcgaactgctagtcacaccacctacaggtggtatcccaaacctgatgcccttgaaagagtggtagcaaatcccaatagctctaaatctgaaaccattgcattaaagatgttgttacgattattaaaagcattatcaactaggatcacatgcggctacgtgtctcggtgggcgacagctaaagaaacttgcaagcccgttgttccacaccaatttcagcgcgatggagacctctccagtctctccacatcttctctttgccgggcggagggaggaggctctctccatccccacgactgccgttctggggggcaagtcgagacgagcacgcctggctgctacctccgcacccgcgtcccacaagcttgctttcggggatctcacacatcaacatggaatctctccagaggccagaggagaatgaggggcactcgcgaggactaaggtagaaagccaggatccccgggctgcgggcgagcgcgtctcccatggctccccaggctcagccgctgcctcttctgggcaaatgcaaagcaagcaacgcacccaccccccgccctccccggaggccgacctggaaaaggaagagcgggaaggtgtctacaactgttcctcagccacagacagtcccaggatcatggcccagagagagagagagaaagagagaaagggacaggattaactcactgctgctccagatcatcggccatagtaaacaagccttgccaggtcctggcgagcccgcccagcgcctgacgccagcaccagctgacccgggaggccgcggggagcaagggggcgtggccgcgcagggggcagggctcgcggcgggccggcggtcggcggtgggaccctcaaaactctgcaacttggtttcagctagtggggcccttgctgtgttttcaatcactggcatgtgtcccggcagagatgtctctgacggtctcagaatgggacagtaatcctggtcacacatttgggggagtccttgcaggagctccgacagccctcccttctctcataactaaaaagtggtagaactacgcctgcacgctcgcacccactctttgggcttcccattgtaactgtgtcctcctgaaatcgacccttgttaatgttccttctagtaagaggcttaaatgtttgtggagacaacgccattggttgaatgctcctacaaagggcctggatgccagatttcgaaactaaaatacaggacacctagttaaatgtaaattccagatttaaataaagcaaatacttttttagaataagtatgggccatgcagtatttgggacataagtaggcatcctgtattttctctggcaaacctaaacctatatgacatctgccaaaatgggcatatctctgctctgatgttgactctgaccccaacctattttccagggaaaatatagctcaactccaggtcaccctcagtttggaggataacagttgaaggactcaccaataaggctaggtctcctttcggtatgtaaatgcggggacagggagataaggctggcttggcccagaggtcctgagtgcacttcagtttgctcagcagaggagctaaatcttgaggctggctgctgaatttgcttgtaccggtaaacagggcctgacctccctggaactgtcagatttcagatcatccccttagttaaaaccagactaggggtggggcgcggtggctcacgcctgtaatccctgcaccttgggaggccaaagtgggtggatcacttgcggtcagtagttcgagaccagtctggccaacatggtgaaaccccatctcttactaaaaatacaaaaaattagccaggtgtggtagcaggcacctgtaatcctagctactggggaggctgcggcagggagaattgcttgaacccaggaggcggaggttgcagtgagccaaaattgtgacactgcactccagcctgagagacagagtgagactccatctcaaaaaccaaaaacaaacaagcaaacaaacaaaaaaaaccagactggggagtggtggaggatgggtgagagaatgctggtgcacaggggtttatcaaagcatttttctttagccttcctgcaggacccagatgattctgagatttcttctttgtagcaacacagtgttaagctgatcattataaagacttaacgtttaggagaaccagcatttatagagtttaggggcttaggaatttgccagatgtggtacaaagtagttcaactagcagaggacttgtctctttcatgcaaccttttttttttttgagactgattctcactgtcacctaagctggaatgcagtgtcatgatcatggctcactgcagccttgaactcctgggctcaaggggtcctcttgcctcagtcttctaagtagctaggactacatgtgcccagctaattttttttttagtttttgtaaagatggggtcttgttattttgcccaggctggtctcaaactccttggctcaagctatctttctgccttgggctctcaaagtgctgggattacaggggtgagccaacaaacttggcttcgttcaatctttcaacaaagcacagtggttctaaacttcagtatgcatagaatcatctggtggatttattagaaattcagatttctgggctgggcatggtggctcacgcctgtaatcccatcactttgggaggccgaggcagatggatcacgaggtcaagagtttgagaccagcctggccaacatggtgaaaccccatctctactaagaatacaaaaattagccaggtgtggtggcgcgtgcctgtaatcccagctactcaggaggctgaggcaggagaattgcttgaacacgggaggaggaggttgcagtgagttgagatcgtgccattgcactccagcctgggggacagagcaagactccatcttggaaaaaaaaaattcagatttctagcacctaccctctgagattcagattcagctggtttggcttgatgctagaaagccgcatttttaggaagcaccgcagatactggtgctccacgagactcactggttggttagaagtatagattctggagtcatgaagcctggttaagttcagtatttgctttgccacttatccactgtaaatccttggccaagttatttagcatctcttaatttcttcctctggcttgtatcttgtgagaactaaccaagataattcaaataaacatgtggtacacttatttgtgatacgaatattacttatttttgttgttgctgttattcaatgccaagaattatgttgagcactaaaaatacaattatccagcctgggcatcatagcaagactctatctctacaaaaatgaaaaaaattagctgggcatggcaatgcacaccaaaagtaacagctactccgaagggtgaggcaggaggatcacttgagtctaggagtcagaggttagagtgagctataatcccaccactgcactccagcctaggtgagagtcagactctgtctctaaaaaaagaaaaaataaataaaagcaattatcaaaaggaaataaacaacctgctctagtggtaaacacagactttctatctgttgctaccctaggctgttcttggctttgcagagctgataactttgtattcagagctcagctcaaacttcccctcatctgaggcatttcttgaccacaggatctaaagagagccccccatcactctgtcacattaccctatttttattttcttcataacacataacattatctgaaattatcttgcattgtttttactcatttattatcagtttccttccactagagaataaatttcctgggggaccctctctgtcttgttatctgctgtgctcccaacacctagaacaaagtgtggcagagtaggcactcaatatttgttgggtaaatgaagaaaagtctagtgaagaggcagaagcataaacaattacctatgaaacaatatactaagtgtcaaaggctttgggagctacattctaaattgtaccaaatagaaaattccatactgtatcactcccagacaggacaataaaatctcccacttttctgaaaacctgtaagttgtgagatttttttaggcaaggacgactacacatgaactggtattagatctctctagaccatttctcaggagtgcagagaagtgtttgtattttgttttcatgtgcgaaatcagctttaaagtagaggtttcttggaagtaggaaacttgaatggatggaaaatgcctttaataaccaaagttaccacagtttttaaggtatccccagtgctgatgtatctcaggatcaggatggatccgctagaattacacagagtaaagaggactctcggagcctactctaaggcaggcctctggggagaaaatgtaagttattttttttctccttatcatcaggacaaagcacaccatgagcaagtatgagactccaacaagtgtggatggaaattaatttgacaaatctgaaaccatctttgcaaaattatgactgagacagtgaaagagatctaacttaactgactccatctcgcttctaaccaggttgtccttgttcattcctgggcataggctgaactaactttgggagaaacttagtttatagtttgtggtttgtgacagataacagccctttcccggggctgacttccttgttgcctggagactagattgcctttgtaacactaacattagccataagattggaaattatggtttgggagtcatgcagctggaggctacaagattctgaccctccctagactgctcctaagatcagtgcttgagatatttggtgacccctgcacttgatggatcagctggtaccactcagattgatgaactggctcatctgatcttgcagcgccccccacccaggaactcagggcaagaagacagcttggactccttattatttcttccccgaccatcaggactcgtggctcactggcttccccaaccaagttgtccttaaaaactctgatccccgaatgcttggggagactgatttgagtaataataaaattccgttctcctgcacagctggctgtgtatgaattactctttctccattctaattgcccagtcttgatgaaccagctctgtctaggcagcgggcaaggtgaactccttgggaggttacaaaccctctttctatgactgtaagtcatcactgagtattccaaaagtaggtggagctgataaactgatagctcaggcctggcagctatagattattcttgtttcaaatgggtatcactgccatttgaataaactgtgaacaaggtatatctctttgactgaacatagaaatgagtggaatagctcataagttgttctgtccaatgacagccactagccacaagtggctacttagatttaaataaaagccaaataaaatttccttagtcacactgtaaccaagtatccccatttttctaagagatagtttaatgatttttaaaaaatctctcttcttttcccccttctcctcacttcctccttagctctttagaaatgcaattgtagccttttacctcctctttatcagacactccctatggggcaggttcatctaactatgtgcttagaagctccagagaggaactctcacccaccgggaggttgccttgagagacaacagcctatctacaacccaaagtatgcctgctacaaagctttctcttacctggagagttttggccacttttacaacccagtcctgcccacaaaaggcaccagcagtcactgtccagtagataaggcactgaaggtagtatgcagaccccccaaccactcgcttcctcccctcgtgccattcatgccagcattccatgccccatttcaaaagcaccctctttctgctccaaaagtgaaatggtacccttaaggcagaaaacctgtacttcctcccctaaggtagctttggaataaaatatcattttctttataccagatctcactcttgttaagtggactctgcaagcagcgagagagtgaacctgcatttgggttacaacactaactagtttaagtgctcaatagccacatatgtctagcagttactatactgggcagtgcagagacattatcacagaaaattctattgcacactgttgctcaggcactgatgatttcagccccatgttgtggtgagtgatctgctcttggaaaggacaatatagtggactcactttcgggtgccagcaagggggcaaaactgaggcttttttgagactcccaaacagctaggagggagggaaaccagacaaaggagctgaaaagttgttccacttcatcagaaactgaaaggatgaagggatatgggttcactgaagatatttactgctttactaggacttgatcagaaacttgatactttaaaaatttgactttgtgctgtttgcaacttgattctccttaaatttttatttctgaaaataataacctattttatctgttctattaggaaacaaggagagggggttttggtcacactggggccaaagtttagaaggtagagattatatatgcaatagcagttaacagaagcaaagaggggaatcttaaggcaaacgtgacaatgcaagggaaaggaaatggaaaagacattcttttccatgcggagatttcctttagaagagttattgtctactcaaactttggaggatttgtgtttcttttggtaaataatgtgatttctttttgtagaggatgtatgatgtaaaatcatggactttgcccttaagggaaccctcttgctcctccactcttccattgttttatgtaatgaaacccctaaagtatactctgacttcagtttcagcttataaattagatctgccctttaagagccatttgagttgcagtccctccagtgctatcttttgcatacccaaattattgggggcgctgtagtttggctaacttttaatcattcagagaactaggagaagcagacatggttaattactaggattaatgatagttaataagagcaaacatttactgaacatttactgtctgccaaacactatgctaacagcttaatgcttaacattatctcatttaatcctcacataatttcaatgagccaggtattgttatttctgttttatagaaaaggaaaatgagactgtcagactgagtaacttgttccagattagacaactagtaaacagcagaatcaaggttcaaacctaggactgtctgattctagagcttgcactcttatccactactctggacaagaattttaaactatattaatattctgatttaaactaattgaaatcaacactagtgttagcaatttcctattgacagatcagttaaaaatgtttcaatgattatagaatcataaaccgaatagagaagtaggccttttcttgctgttttaagtagttcagaaaagccctagtgtagtatattggtgtgactagcaggtctcagaaacaaatgcattcaataagtccatttggtgtttttcatctcttcttctctcctgtgagagttcctggggagatcttaatgatgatagttgacatggatcaaaggcagacaaaacataagggagaaaacactggaaggagcctggctgatggaacagaaactccctgaagaatccacacctgaatgattaaaaagcatcagcctagcctgtaaagtttgaagttgaatattcgtgaggaagctaccctcctacttgttgatgaggcagagagaaaggttcaacttgtcagagaaattgatgcttcctgccatattatattgaaataagaaccagcttgttatccactctttttttttctttctcagcaacataggtttaggctgaacttatgttcatatagctgcacaaatctccacgggtatgaatataaatctatctattcaaatagactctaaaggtttcttaggttatttctcttctttctagaacttaagtaaggctttgatcaccactgataatacatccgttagttaatgcgtgtagagtttccagtctaaaggcaaataaaaagtgaaaaggggccggcgcagtggctcactcctataatcccagcactttgggaggctgaagcaggcagatcacctgaggtcaggagttcaagatcagcttggccaacatggcgaaaccccgtttctactaaaaatacaaaaattagccgggcgtggtggcaggtgcctctaatcccagctactcgggaggctgaggcaggagaatggcttgaacccaggaggtggaggttgcagtgagccgagatcgcaccattcactgcactccagcctgggtgacaagagcaaaacttcatctcaaaaaaaaaaaaaaaaaaagtgaaaaggcaggaacgctgttgttcacctgctgttttaggaattttgctcacgtacagttcaaaatattaagaagctgaaaataaagtacctggtcatgtgtggaaaaacttacagctaaaaggtgagatgaactgggtctagaaggtcggattcacgtgaaattaaaagggcaacgaaagccagaacttaatttcttaaaaaaagttaaaacaggccgggtgcagtggctcatgcctgtaatcccagcactttgggaggccgaggctggcggatcacaaggtcaggagttcgggaccagcctggctaacaatggtgaaactccgtctctactgaaaatacaaaaattagccgggcgtggtggcgcgtgcctgtagtcccagctactagggaggcggaggttgcagtgggccgagatcgcgacactgcactccagcctggccgacagagcaaggctccgtctcaaaaaaaaaaaaaaaaaacagttaaaaccctcaaaataatcccacttgttaaaatacaaaacctgaaaccatttcagtttcttctgcaaaatgagttggagagagtagggttgaaccaggcatgctctttcgggcctttcgacgctgacatcccgggatattacaccaggttcaagataccagcttgcggaaagagagctgctaaacttgaccatatgctttttgcacgacattcgacagctgtccctcccttcaccagctcttttaaggctgcaaatatatctgattcacgtgagagtccctacaagttagtacaacgtcaggccccaaggaggcgcccaataaatgttggcattgcagggccagatcccgagttccagttcagaaccctgctgaggtcaggcttcctccctgcctcccgcccctcaccacacccactcactcccccaagtaattaagtctaaactggggcctgtgcagtgattggccgcgccgggtctcactgcggatgaacttgacttgttccaatgatctgtgacagacatctgcagacagcgcccttaacagaattagggtcaggctggtatcaaaccccaggaacgccaggcattgcctcaaagtagatgcaaaccgttaaatcttccaggactcagaaggaccagagagagccggatacctctggttagctacgcggtccccagtaaagcttattcccctcttcctcccagtgtgtcttgttgccagagcaactgtgggcgtcaccgagctgacgggcggaaacagaacagaaagagtacacgtccccagctcattgatagggccattgcgcagacgcattaacttttctgagttgtagttgagtctgttgatgcagtccgcgtctgcgcattagttgttacgcgccctggccggcctcagcgcctgcgcaaattggcacaccggggagggcggagttaggtcacgagggtgcgcatgcgcaaacagcacatccggtgtggtcgacgggtcctccaagagtttggggcgcggactggagtaccttgcgtgcagttatgtcggcgtcggtagtgtctgtcatttcgcggttcttagaagagtacttgagctccactccgcagcgtctgaagttgctggacgcgtacctgctgtatatactgctgaccggggcgctgcagttcggttactgtctcctcgtggggaccttccccttcaactcttttctctcgggcttcatctcttgtgtggggagtttcatcctagcgggtaatggttctataagtgatcataataataatgtgttactttggtgtgctgcttttgttttcatagtactctatatcagaccaccgccccttgaagttatgagaagagcctgcattgcccttttgttgtgaatggggaaattgaggctcagaaagcttagattatatgcctaataccaaacggctccgtaggagttggacttaaaagtctaaagaaaccaccttcgtgccgctactccacttggtgatccacttcacttaatattggtccggggaaaaccctattccaactttaacttaggtttaacacaactctaaaattagtagacttttcaaatgaaaaacccaaccttgaatcatctctgtcatcttggcctaatcattaccaatctccggtgaaacgtttcaatgaaagtgcaaagaatataaatactggtgcttttcttgttgaatcatcctttacttgattttgccttttagctgctactactttttttcttgttgaggaagctgttatttcactgtcctgaacccaatttttgttcacataactctattttagccttatttttccttttgattccaggatttggtaaccttgtagactgctatatttagcgagaacagtctccatcaatttttgttaaaatctgacttttcttgcccaacggggattcagtgaatactgaaaacaggcgtggcctctatcactggtatcacctgctactttgactttgaaaacatgccagcattcatggtttcttttcagtgtgatcatcagtcaggtcatcagttgtattttcagtccaatatgaggcattatggtaaaagctttggcacatgttctttatccgtaaagagtttatggtctagttggggtacagacaaaatacagcattggaattgtctggaggcctggcacagtggctcatgcctgtaatcccagtactttgggaggccgaggtaggcagatcacttgaggtcaggagttcaagaccagcctggccaacatggtgaaaccccatctctactgaaaatacataaattagccaggcatggtggcacacacctgtaatcccagctactcgggaggctgaggcagaatcgcttgaacccgggaggtggaggttgtagtgagccgagatcgtgccattgcacttcagcttgggtgagagtgaggctcagcctcaaaaaaaaaaaaaaaaagtctggtgacagtggtgctgtgcttaaagttacagacctatagaatgcttattgtacatttacattgttctgacacaccagagatatttcttagaatttaaaacaggtctgaggatctaatgacttgtgtactgaagttgcagattagccttttgattggatatttagttaccatctttgacttttgtcctagatgaccaagacctagttgtctgtggtggcgtccttgccttcaggatgtgttaaccatcatccgaccagatacactacccctttgctctaagtattctccaccacccacccaccgccctctgccacggtactatatgtttttattagccagcccggagaaggaaccttgatgagaacttttgatttaattttgtttgatgtttttgtttccaggtctggaagagtaggagcaaggcagggtctgaaagctgattttaaaaaagatgccttctccatgtagaagtcaccctgccttcataagcctctagggtctagaatgatttttcatggatgctttgaagaatgtggtttgctgaagagtgggcatggactagagttatagattatcagtgtaataaagccagaaggtttttttgagcaaatgactttcacttatgccaagacctgtttttgagcccgttgtggctgaaattgaattggcagactggactgcctttctcctctccagtgggaactaggtggcttgtcattgaagaaaaacctagtaaaagggcatattagtaatggggccaataagggggattaggatttccagatctgttagataacagataatagagctatagaaatgaaagcaacttcaagaaaagaagggattcatgataattcttagttgccacagaagggtatgatttacccttcttttgacagcattgactttcctaaatcctgcctcttctgccatttgttagcctagatcatcaactggagactggttttaatgggaaatttggacgcttatcctttgttttgattgttggcaaaggtagccttgttcctttttatggtgctggggtttctaactttcctgtggaatttcctgttgcaagagaatggaggagtccagtgagctgggagagggaaatgtaggcgatactgttgaaggattaggtagtgctgggtgctagatgtttgaatgccaggccaaggaatttggactttttttgagatggagttttgctcttttttctcaggctggagtgcaatggcgatctcggttcactgcaacctctgtctcccaggtttaagcaattctcctgcctcagcctccgaagtagctgggattacaggcatgtgccaccacgcccggcgaattttgtatttttagtggagacggagtttctccatgttggtcaggctggtctcaaactcctgacctcaggtgatccgcctgcctctgcctcccaaagtgctgggattacaggtgtgagtcactgtgcccggccaggaatttggactttatcctgtaggtaatagtaaagcttctgaagatgcttttttttttttttttgagacggagtctcgctctgtcccccaggctggagtgcgccatctcggctcactgcaagctccgcctcctgcgttcacgccattctcctgcctcagcctcctgagtagctgggactgcaggcgcctgccaccacgtccagctaagtttttgtatttttagtggagacagggtttcatcgtgttagccaggatggtcttgatctcctgacctcgtgattcgcccgcctcggcctcctaaagtgttgggattacaggcgtgagccaccacacccggcactgagggtgcttttttaaagaaaggaaaagatttaaaattggtgttagcatgtaggatgaattggagggaaatgttctttaatcttctctatttttttttggcagtctattctcttctattccctctgcatgtgttagtttagcatatgctctttggaaattgaccagtacattttaaaccaattcagaacgctaccaaacctttaaaaaacctgttgttattgggcctgatggtatgaaaatagtctgttttcttctattccctcatagctgagagacttaaccatggtttcaagaaggaaccagaggtagaaagttgtcattgagagatctttttttgtgtgtgttttggatcatcagagtataatatattggctttaaaaggacctcagaggtagaatatttttctatttgagacagatttcaaacatccagtagctgactgtttatcttgtagttagatatctctagaagaggacatctgtcccttttttagagttatattccagtgttggcaaccctttagtttccttttttgcccaactgaaagctgtgctcatttaaagtgctatttaggagggataagtagaaaacattaagactgtcctcaaaataagtctttggtcttgaaacaagttttaattcatttcccaactttcatctgttctgttctctaatctatatgaggtaattttgtcttaaaaaatagttttgtttttcctagtttacaaattcaaaaccagtttgaatctgtaaggcaaggaggcctagtccagagttttctgtctcacgggagctattaggctgttgtggactggggtccagcatttcttttggaattatccatcagatctgtggatcctaatattatctctcataactgttatccgagagattagaagtttgccacccatgtgcctgatagtcttgtttctaaatatctttcatatcattgctactttttcatcctctgttttagcctctcaatatctcttatgaagactactgtaatcctccttactggccttccggcctctggtttccagtccatcttctactgtgtttgcaggcttgatttgacttgcaaatctgattgtgtcactcccatgtacaatttgtgtttcccaaagtaaaattaaaactttttttttgacatacaggctctttcatgatctggcttcctcgctgtctgcagcttcatctcttgcctctgcctcctctatactctgctccaacagtattgagctacttgtcattctctgaacactctcatgtgtcaaactatttgcctttgcttgactgccttcaaaattccttcactttttagacttctcagctcaagtgcaatttccttttttttttgttactgtttttaaagagaacaaggtcttgctatgttgcccaggctggcctcaaactccttggctcaagcagtcctgcctcagcctcctgagtagctaggactataggcacacagcactatgcctggcttattgccctttggaacccttccctgactctccagcagattgaggtctttcctctgtattcctttttcaccttgtatgtgtgtgtgtgagagagatatggcattgtgctgtatttgggtgtctgccttctctctggaaggtgagcccttgagggcaggggctgtcttctcatctctccatcctcagtgctgaacactgtatatgttaaatggtgagcaggcctatagtcatgtcaggaatagtgagcaatgatgtgctaggttctctgccaaggtgctgggaattcaactgtgaagcacacagacgtggcttctactctcacagagtttgtaattagtgggaaatacagacaagtaaatatggatatggtgctgatggagaattattggtgagaatgggaacacaatgtgcatccaaccctgcctagtggtcctgcaataatatttctcttatacattcgccttcctaaagtaggcttcataaatcactctatttttcctcttttcctttattcttagttggtgatcttgcttttattttttcactaaaaaaaagaagtagataagaattccttcatcttttcaccactgaatcataacagatcacctacttttatacccatactctctgacttctcatggtggatgatgtgtctctttcctgtgaaagctctgcttgtgcagaggatccagtcttcccttgctcactcagggactccgcttctgcaattattcctctgttccgtgtcattaatttctgtttctctcctggatcattcccatcatacaaacatgttctaatattgtctatttaaaaaaaatccgtttgaccacagataatcttctagctaccatcccatttcctttccatcattacagaatttcttgaaagaataattaatgttcctacttcctcccttaactattcattccttaacccactcttggtattggtctgtcctcgctacttcactgaattacttcactgaaactactcttgccatgttgcaacgtttagcatttaatgtaggtattggcttctgtgtaaaaggaaagttttttcttgaatacaacactctcctgcttgttctgtctcacctcactgctttttcctttctgctgttttgtgctgggcgcttctctgactgagagcatggttgtagataccttcactttgtatttttttttaaatagataaacttaaataacacctgtatacctacaactactcctttatatttttagttttgaactgtcccccgaattccaaattagtaaatccagttgccaacttgatgtcttcacttgatgtctgatatgtaccttgaacttaacatgtccaagatcaaacctgctcatccagccatctgcctcttcaccagttagtacgtggtgtcaatgttggttgtggttttttttttttttttttttgagacatagtctcactctgtcacccaggctggagtgcagtggcacaatctcggctcactgcaacctccatctcccgggtttaagcaattctcctgcctcagcctcctgagtagctgggattacaggcacgctcccccatgcccggctaatttttgtatttttagtagagacgaggtttcgccatgttggccaggctggtcacgaactcctgacctcaggtgattcacccacctcggcctcccaaagtgctgggattacaggcgtgagccgccatgcccggccggttgtgtttttaaatgaagaaatttaagtttccggggtcccttgatttctcttatctcctgcatctgtttcatcagcaagctctgtcttctccaaaatatagcctgtatgtctttatttctgtccatttttactaccattcccctgagctctttgggtcctaagtaattcttctgcttctttttattttttatatttttgagacggagtctcgctctgttgcccaggctggagtgcagtggcgcgatttcggctcactgcaagctccgcctcccgggttcacgccattctcctgcctcagcctcccgagtagctgggactacaggcacccgccacaatgaccggctaattttttttttttttttgtattttttagtggagatgggtctcaccatgttagccaggatggtctcgatctcctgaccttgtgatccgcccgccttggcttcccaaagtgctgggattacaggtgtgagccactgcgcctggcctatttttatttttatttttatttttttgagacgcagtctcactgtgtcgccaggctggagtgcagtggcgcgatctcagctcactgcaacctccgcccttggagttcaagcgattcttctgcctcagcctccctagtagctgggattccaggagcctgccactgcacccggctaattttttgtattttatttttagtagagatggggtttcaccttcttgaccaggctggtcttgaattcctgaccttgtgatccacccacctcggcctcccaaagtgctgggattacaggcgtgagccactgcgcccggccttctgcctctttttaaccttgcgaaccattatactgttccaccgctcttataactgaatccatactgttttctgaggcttaccatgcccctcaggatttggcccttgtgtccttccccttgatcactatagtcttgttggtctgtccttgatttttttttttttttttttttttttttgagatggagttttgctcttgttgcccaggctggagtgcaatggcacgatctcggcttactgcaacttccgcctcccgggttcaagcggttcttctgcctcagcctcctgagtagctgggattgcaggcatgcaccaccaagcctggctaattttttgtatttttagtagagacggggtttctccatgttggtcaggctggtctcgaactcccgacctcaggttatccacccgcctcgacctcccaaagtgctgggattacgggtgtgagccaccatgcctggcgtctgtccttgtgtttataacatgtcaagattgttcttactgtctagaatgctctgcccccagatttttacatggttggttccttatctttcaaatattggtcttaaatagcaagctcttaaagagaccttctgttatgattgaatttaagaaaagcttcccagtcactctttattatcctgttttattttcttcatagtacatatctctacctagtagttcctggtttatttgttaacttattgattatatgtttctctccataggagtgtaagttccttgagagccagactgttttgttctgtgccatattcctagcacctgaaatgatgcttgtcatgtagtagatgtttagtaaatattttatggaataaatggacatttaaggggatagagtaaatcagaattgctaaaatggaacagactgcttgaagaggtagtaaatttccatctttggaagtgcccagggagagactgaaggatcattggtagtggagcattttgaacaggcttttttttttgccttttttgtttccaatgcatctgagagatgtgatatccttatcagtaacacaggctctggaaagttgataattctccatctggaggtggcttaccagattctgtaagtggtgagtatactttggaaagcttcccacgtgattagtacgcctccccaagcatggccaccccctaccacctcttgggcattgtatacatcaaatggggtgttggtgtttatgacctctgaggtcctttccaactttgtgggactctgattcatatgttttcattgaaataatctggttaccatgatcacaataataataacatcaatttattaccttatccaccttcatggataatttttctttttttccctcatatttcctcaaaactcaacaccgtgttctttactccaatgaccactattaatagttttctatttcttcagatttttttctagattctaactgaaatgacaagataattatgtatatcattatatgtaaataaaatattttactttttttttgagacggtcttgatttgtctcccaggccagagtgcggtggcatgactgtggctcactgcagcctgcaacctctacctcctgggctcaagcaatcttcccatctcagcctcccgagtagctggggccataggtgtgtgctaccacacctggctaattaaaacattttttttgtagagacagggtctccctatctttcccaggctggtctcaagctcttgggctcaagcgatcctcccaccttggtttcacaacatgctggggttacagttgtgagccaccatgccctggccaagtgaaattaggaatgggctgggtgtgggggctcatgtctgtaatccctacccttaggcaagcagaggcgggaggattgctgggcaacatagggagaccttgtctttaccaaaaacaaacaaaaaaattagctaggcatggtggtgcatgactgttgtctcagctactcagggggctgaggtgggaggattgtttgagcccaggaggtcgaggctgcagggagccatgattgcaccactgcactccagcctgggcgatggagtgagaccctgtctcaaaaaaaaaaaaaaaaaaaggattggctttttttcacttaataagtcttagatatgtttgctgtcaatgtacagagaatttaccttattcttttgaataattgcatgggatttcattgcatgtcagttgtatagtttaatccccttgatgtttagactgttttaatttttttttcaactttacaaacatactttcagaatgtctttgttctgtaagataaattcctttgtcaaaaggtaaaatcattttaaatattaatggatattgctagttgctctcccaagtggatgaatgaatctgtactttctacagcaggggtttacactggttacccttgcttcagtcattgtctttaatatttttaagggtctggatacctgaaaggatcaatggtgcttccatggtgtttacatgtttaagcataatgaaaactgttgccatggtgacaggctctggagaactagtctgatagttttctggcctttggattagatttgtttgttgctttttcttagttaatgatgggatgatgctagcctgaagcgagtttaggttttcttaagcaatgtaataatttatcacaggcataaagatacttcggaagagtgtattcctggaactgcctgtttttttttttttgtcaatggtgactgttagaatcttcaaggggatggagtgtggcagtggagagttctcatgaattatctctcttaggtcttctgccttttttgagacaaataagcagctgctagaacttcgagatcaaagatagtttatcgagaactgtgaggttctcaagaatgagcgtgctatctttataaactctgctacccattaaatgaatattctattagaaaataattcacatttttataactttttatcattcagcccggaccctttgttgttgcctcaagtgcatccccatctaggtataattagaaacctttaaatcagcagataagagagctttgtgggttttttggttatatatttttttctctgagaaagcctctaggtttcagtgtaactctgagaagtaatattttttttcctttaacagagtgcgaaatttaattgtacaacttgataaatttttaaatgtacctgtctaaccactatccagatcaagatgcaggacattaccagcaccatagatgcctccttgcatcttcccagttatcctctccctgtgaaagataaaaaccactatcttgccatagattggttttaccaagttttaagctttttgtacatggaatcatatagcatatacttttttgttttgttttgttttgagacggagtctctcttgcccaggctggagtgcagtggcgcaatctcggctcactgcaacctccacctcctgagtttaagcaaattctcctgcctcagcctcctgagtagctgggattacaggtgcgtgccaccatgcccagctaatttctgtagtttttattagagatggggtttccccatgttggccaggctggtcttgaactcctgaccttaggtgatccacccaccttggcctcccaaagtgcggggattacaggagtgagccaccgtgcctggcccttgttttattttttaatttttttttttttagatggagtttcgctcttgttgcccatgctagagtgcaatggcacgatcttggctcacctccacctccacctccaccaattctcctgcctcattgcctcagcctgccaagcaactgggatcacaggcatgcgccaccatgcccggctaattttgtatttttagtagacaaggggtttctccatgttggtcaggctggtcttgaactcccgacctcaggtgatccgcctgcctcggcctcccaaagtgctgggattacaggcgtgagccaccgtgcccggccttttttttgtttgtttttggtcaagataaaacatgacaaaatttaccattttaaccatttttaagtgtatagttctgtggcattaagtacatgtacattgttgtaaaatcatcatcactatccatatccagaacttttttgtcttccgcaactgaaattcagttcccattaaacagtaactcctcatcctcctctctgtcagtccctggcatctaccattccactttctgtttctaggagtttgactactcttgatgtcatataagtgaaaccacatggtatttgtccctttgtcatggcttatgtcacttaaaataatgtcctcaagattcagccatgttgtagcaggtatcagaatttccttccttttaaggctgagtattccattgtatgtatacatcacactttgcttatccgttcttctgctgacacttgggctgctctcaccttttggctattgtgactaatgctgctatgaacatgggtatgcaaatattgcttgagagcctggttccatcccccaccctcccaacctcccagatggagtttctctcttgtcacctaggctggagtgggacggagtgatgtcggctcactgcagcctccacctcctgggttcaagcgattcttctgcctcagcttccctagtagctgggattacaggcgcctaccaccacgcccagctaatttttgtatttttagtagagacggggtttcaccatgttggccaggctggtctcgaactcctgacctcgggtgatccgcctggttcagcctcccaaagtgctgggattgcaggtgtgaaccactgtgcctggccgagatcctgctttcacttcttttggatatgtacccagaagtggaattgctggattatatgatatggcaattctgtttttaatttttttgaggaaacgcagtactgtttttcacactggctaccctatttgattttcccacttgttagtgcacaagggtttcagtttctctgcattcttgccaactcttgtttttttgatactagacatcctaatagatgtgaggtgatatctcgttgtaattttgatttgtattgccctagtgattaatgatgttgagcatcttttcatatgcttgttggccattcctatatcttctttggggaaatgtctattcaagtcctttgcccattttaaaatctggttattattttgttgttaattgcattgtaggggtactttaatatattctgatattaaccctttatcagataagtgatttgcaaatatttttccccattccgtaggtgccttttcactgttgtgccctttattgtacctttatcacagaagttttaaactttgatatagtccaatttatctatttttactttgttgactgtacttttggtgtcatatccaataaatcattgctaaatccaatgccataaaacttttgctctgttttcttctaagagttttttagtttttggtctttatccatttcggatttaggtctttgatccgtttcgagttaatttttgtagtatatggtataaggtaagggtccagcttcattcttttgcctatggatatccagttttcccagcatcgttggttgagaagactgtttccccattgagtggttttgtcagtttggttgaaaatcatttgattttgtatacgagggtttttgtgtgtttcttaaaaaacaaagcaattaaattgattcattttttaactgtagtaaatgtatttttaaaataaacttataatggaaaacctgaatcattatccctaaatagaaggtcacactaaaaataccatggagctaggcagatgtgttcacccgtgcctgtggtcccagctgctcaggaggctgaggtgggaggatcgcttgggttccagtccggcctgggcagcaccaccagaccctgtctcctgccgagttctcagtggctctgtgtggctgcatcccagaatattcctcatctaattgagggggtacatttgttcccccagcatatacacttaggctctgccctgtggtctctgtgtgggagctgggcttttttgtctttggcttcctctgggtacctgccaggttccagctggtttggccagccagtgtgtattttttaagttttgtccgggcacggtggctcatgcctgtaatcccagcactttgggaagccgaggcaggtggatcacaaggtcaggagttcgagaccagcctggtcagcatggtgaaaccccgtctctactaaaaatacaaaaaattagccgggcatggtggcgcatgcctgtagtcccggctacttgggaggctgaggcaggagaattgcttgaacccagcaggtggagattgcagtgagccgagatcatgccactgcattccagcctgggtgacggagcgagactctgtccccgactccccaaaaaataaagtttttgattgtgttgcccaacttacttgtgcaattcatccatttttgtgtatagcagaagttctttttcattgcagtataatattctattgtttgtatatgctataatttatccattttactgttgatagacattagattgtttccagtttggggctatctgggtatcatttctgtgtatgccctttgatgtatatatgcattcatttctgttagagtagaattgttgggtcctcgggtatgtctgtgttcattagcatatttattttatacttctatataatcatttttttgtgttttgcttcttgtgcagtttgcctgagaatacagatcaacccacagaacaaagcggatttccaaggcatctccccagagcgagcctttgctgattttctctttgccagcaccatcctgcaccttgttgtcatgaactttgttggctgaatcattctcatttacttaattgaggagtaggagactaaaagaatgtaagtgatgatcatagtccttgtcctataatgttgattttaggaagagaaattggatgggactggttttgatcatggttggccaggctcccatactgctattgacatttgcagaattttccattggtctgcaaagtatgcattaatatcatcataattcatcagtgctactgctcttggtcattgccttgtctttctgttcttcaaatcattaaggtaatagaaaattaatgtttgtagctagtacaataatttctgtaccaataactccacgaaaataactcggagattttggaagagacataaatggtaggttttgcctttagatttgttagttaatttttttctgattttgatctcagatgacttttaatgctggaccattgttttcatagcacttaaatttgatagcatccagtgtatgttgaatgaatgactgtgggcatttgctaatatgtgccttaaagtagaaataaatggggaaattgggttaacttgggagaagactttaaaatataagatgggatgctgcttggttcatttgccattttcacttttttagcagtagagttctttctcccttctcccaaacaaactcttacaaaaagaatcttggtatataaagcagaagtagaattggagttttttttgatggacagaaattgaaaagccctctctgcttggccttcatcacatatggtacgccctcccctaaatcgctccctcccaagcagagttctaaagctttaataaatatatggctgttttccataccgtatgtcaacactgttactttatatatgagacaacagaggcctagaacaatccattggccttccctggccacatagttaagtgtttgcagtgaagtgccctagtctagcggtgttcttggccccgtactccttccggtatcccatgtagcttactgatgaatgcatgcaatctttgcctttgcattgcaaaatgtaatgttctgggtggtagagaaaagagaaccttaggagatctcatcctatttgggggaaggatatcctaggaccaacctcttcctgtcaccacttggaaagctgtcatttttatactaaccagcagaaatctagtataagagttagagcatctatgtgcaaagtggatgcaataatgtggaagtgactatacttccttttctgacatgaattagtcatttacttataatatgttacctaaatcctttcctttgatactgcctcaaaaacagttctgttagttcaggtaaggtatcattttggtagtggtaagttgacagtgaggtttatttcagtgaaaaactttttttttttcttttctgtttttttttttttttttttgagatggagtctcgctctgttacccaggctggagtgcagtggtgcgatctcggctcactgcagactccgcctcccgagttcatgccattctcctgcctcagcctcccgagtagctgggactacaggcgcccgccaccacgcccggctaattttttgtatttttagtagagacggagtttcaccgtgttaggatgatctcgatctcctgacctggtgatccgcccgccttggcctcccaacagtgaaaaacttttaagaaccactttgttctgttattttaatacaatttaactcattagacacctgattaagacttgagttatcctcttcctcccttcctccctccccttctatgtgccagccaatgtcttgttgttgggaatataaacaatattgttggctgggcgtggtggttcatgcctataatcccagcactttcggaaggcgaggtgggcgattgcttgagctcaagaatttgagaccagcatgggcaacatagcaagaccctatctcaattaaaaaaaaaaacccaaaagtgtggcttctgccttcaagacatgtacagtctagtaggggagaatacgtaaacataacagttaaaatacagcccatttagggcctcgctataggtttgaacaaagtgctgcaaaaatccagagaagagagcagctgtaccatctgggagcagggacagcagatgagttatctgagcaatggataacagctattgctagttaaaatgaactgttaccagtggataaccttgaatgcaggtagaaaactgacccaccaacattgaccttctcacgcttgcaaatatgagtaacccttgggcttcctgatagagccttctggaaaggtcatgtcttctgattgcttactctagatttctgaagttctttttttctagatgagtcatggtgtgtacttaggaaggggacacagcaaacatttcaaggatgttttctaggctcagggagataccaaatcatggaaaattatttcttagggctgtcatgattggaggaggactctactgcagagagcttagtatttcaaaattatgacaaaagcaaagacaaaaaagcagtctcagcagaaactgtgtactgcagaccatattaacaacctaggaccacctgctcagctgggaattatgggcccaaagcatagcaaaatcctcaatcccagattgcagtgttaaatctttctatggagagtatgttcatagaaaaatctttctctctgggggattgcccagattgtttttcatagagatccttcatttgaattatactatactgtcctgctctcagtttttaaaaatatacatttatttgctccttttatgtgcttctaactcagctatatgtgcactgtgccacagcactttaaaaatagttccaagtaaattctcaatatttataccagctcagaaggtagaacaaaacagattgaatgtctttatattttccaactaagttgagagtttgatattaaaaaaaaaattctgtaatatagctgatcttacatgaatttgggggtgacaaactctaacctactctgaaagaggcaggtcaaaagaaaatggcattgggttaaaaaaataaacaattcaaggggaagtaaggaagttaacagataatgagtgctcagtgtgtgctatgctttaagtacttcttgttctatatcattttattttcagaataatttcacgaggataggcttgctgttctcatttacagatgaggaactgaagttgagagagcctggctaggatggctgagcacggtggctgatgcctgtaatcccagcattttgggaggccgaggtgggtggatcacctgaggtcaggagttcgagaccagcctggccaacatggtgaaacctcgtctctactaaaaagacaaaaattagctgggcgtggtggccggtgcctgtaatcccagctactcgggaggctaaggcaggagaatcgtttgaacccatgaggcggaggttgcagtgagcccgaattgcaccattgcactccagcctggcaagagtaagactctgttttctaaaaaaaaaaaaaaaaaaaaaaaagagccccttgctagaaatcttacaactaatgtatctatccaggtgatcaagaaagactcaatattttttattttttagactatacaaatgaaaatacaaaagcaaaaattctcccagtgagcttctgacccccagaaatccatgcacacctgaaatgatcagtttttggtgtgtaggtggcggcatatttttgaatgaatccatgacagaaagaagctcagtggatttcagtatttaaaaatgtatatactttagttttttccatgtttgttcttctgtgtttctttgtgaaattctttttttttttttttttgagacagagtcttactgtcttacccaggctagagtgcagtggtgcagtcttggctcactgcaaccctgcctcccgggttcaagcaattcctgccgcagcctccccgagtagctgggactacaggcacttgcccggctagtttttgtatttttagtagagatggggtttcactctgttggctaggctggtgttgaactcctgtcctcgtgatccactcgccttggcctcccaaagtgctgggattacaggcgtgagccactgcacctggcctgtgaaactcttttttttaaaaaaaaaaaaaaatctcagtccatctcaggtgttctgaagggtaatgaggaaaagaaggacagaactgtattggatcacagtttgagaattaaagttcctgatgaattgggccctgggtcagaaggaagggtgaactgggcccaaagggacaaaaccttgcttgaaaatgtgctcagctcccagggagatagttgccaaatgcctgtgccttgttagcattgttttgtttttataatggagaccattctctcacaagtcttaaaaaattcagtgtttgatcctagctggaacaagggggctacagggttgggcagaacattttaaactctgactggcagcactgtttacaaacatgaaattatgttggcttttcgaattcagttaaagtatagtaatctagaaaattacctcgggaaggggaacttgatgttattctgtgggctttgctgccacctagtggatggtatgtttcatgtgttgagcggctactacaaaacatgaggagttgagtttgggggaagaagctactgatacctgtgttaaaaaacctagtttctttccagtcattggggggcagcagaggtccaggtgggtttagatgctgggttgggggttgctttacattctggccagaagtgggcaatgtcgagttaggaacaaaagggcatagaaccctaaagtggccctagattttgttgtgtgggggaagaccaagactgtgcacatagacccgcaggtttcccgtttgatttctttttttcacctccttagtttgagagcttctttttttggtttgttctacgtcttttattctcaatggtgacctcccacgcaataatctttaattttttgttggtggaggggcccatttagtttttatttcattttctctttgatatttccaccttatattgaattaggtcctgccgccaaataagctctctcagagggaactgtcctacatttgtaggaaatctgaggtagtcacatcataacttttttcaactcatttttctctgtttagaaggtgagattaattatatatttttttatgtgctggggtctcgctatgttgcccaagctaggaactccctggggtcaagtgatcctcctgcctgaggcttctgtgtagctggacctacaggtgtgtcacagtgcctggctctgagattagttctttacctttcattcttaaaactttgaatctacttattttatttgctaaaaagtgctaattgatgactttacttgtttattgaactctattttatatttggtgtatttaaggctaccaaagaaaaaagaatatcgaaatagatttatatttatgaatttcattgctgccctaacttactgccttattttctccatcctcccagcttggatgactcctattccaagtcattcccacccctcaggttgcataggagcccttagtctactgcattcctccagtgctgcacttatcacattgttatgaaactattcattcactttcttctctctcccactggactcaattgtgaacagtaacagtgtgtgtttgttgaatgagtgtatgaatgaataaaccttttttttttttttgagacggagtctcgctttgttgtccaggctgtagtgcagtggcatgatcttggctcactataacctccgcctcctgggtttaagcagttctcctgcctcagcctcttgagtagctgggactacaagtgtgtgctcccacgcctggctaatttttgtatttttaggagagacatggtttcaccatgttggccagtatggtctctatcttttgactttgtgatctgcctaccttagcctcccaaagtgctggaattacaggcatgagccactgtgcccggccaaataaacactttttaactgcaagaaaaagttatgttattaagttacttggatgctaaaacatggaaagtggtacgaaagaaaaaaagccaaggcaaagattcataggagaggctgtggggtggggaagagcatgagacaagaagtcagaggaggggctggtgcggtggcttaggcctgtaatcccagcacttggggaggccaaggtgggaggatcgcttgagcccaggagtttgagaccagcatgggtgatatagcaagaccttgtctctaccaaaaatcaaaagaattagaggggcgtggtggcgtgtgcctgtggtcccagctactcagaaggctgaggtggaaggattgcttgagcgtgggaggtcacggctgcagtgaactgtgatcatgccacttgcactccagcctgagtgacagagtgagaacctgtctcaaaaaaaaaaaaaaaaaaatcagaagacttgtattgtaggctttgctctgttaactagttgaatggacaaataaacttacctctgagcctcagtttctctgtctgtgttgtgagaggattggtctggatgttcatcaaagtctcttgccactgttaatgcctctcagcatgattcttgatggttcttttgtgtttgaggaggattgtactgtttttgtggatcctcatttgggctttgctttctgttttctccttaatcgttgctttttattcatattttcagattcccattatccatttataggaggcagaaagttaaatgattataacaagatgcacatatttgtatgaagccttttacaaaaagtaaacatttgtaaaatgtcttctagttcccacgttaacaggcttgtaggattcacatacattccacatatacttttacatacatcagctcatgtgatccttccttcctacccagtgatgtggagacagacaaatagtagtattcctattttacacttgaggtaattacaccttggtgaaactttagttgatgtatccaggccctggaactaataagtgactgagggggaactggataacagacatttggactctaaacctttatattccttcctgttatgtttaggactctcagatgatggctttatatatatgtcatgttagagggttttcattaaaaatattaaacttttctttttaagaaatttttatttattttaaattttcatcagagccatcagactggattcttttcttttttaaatgggaaaaatttggcagagattgataggaaaggatgaaggccggctatctcaaatgtttctgcatagttggccatacttaatatggtccaggagaaatggaggagaatgcaggtcaggagacctgactttggctagggagggtgatcctggaccagcactgtccaacagagctttttgcagtggggaaacattcagggtctgcaccgcccattatggtaaccactagccacatgtggttattgaacatttgaaatgtggctaacagactgaagaactgaatttttaatttaactttgactaagtttaaatagtcacctgtgtctagtggctgtggtgttggacagcacagctctggacagatttgtcaacactatcaggttacagttttctcatctctgtaatgaaaggattaaagaagctgatctctaaagctcctttcattttttagaaatacacagtctgtgccttctaaaactggtgattcaaattgagctgtaaacctagaatttctgcagaatggtctttgattcacattatttctaatttcagttttaattgggtgactagaatccaggatgagatgaatttgaaggaaaatcagtatttgaacatatctgcccagtgctagtgtctgaatagagatattgctggagaagaatacagattccaaatagaaatgaccctggctggcattatcttttctatctctacagcgtcatttttaacagttctttgtgttatgccttgctttctttttagatgattagaacaaactgattaaatggcactgtcttctgcccaggtgaaatagactgaagtcacgctaacttttctcagtaggtgtcttcattttgcatgtcttgatatcaggggaggagattttattagtcagtttcctgaaacctttatgccctggttaatagttgaaaccattcttcttagctgttgagtagtcaattgtgtgagctaatatttcaaagaatcctagaacctctgcttttagaatagtgtctggtaaatagatctgctttaaaagaggggaagcagatctttgtaaacagaattttctgaaaaccactatcaaagagacttactctcatgagtcaatttttgcctttcacgtggactggcctcagcatcttagatttaaatgttttaatataataaaatctttaaactttgattttgtactaaactaggatttcttttatatttctaaaagtgtcaaggctttgttcactgaaaatggcattatgatctagtcctctctcaccttggccattagaaatgtaatgtagccaggcatggtggcctgtgatcccagcactttgggaggctggggcgggtggatcacctgaggtcaggagttcgagaccagcctgaccaacatggtgaaaccccatctctactaaaaatgcaaaaattagctgggtgtggtggcacacgcctgtaatcccagctactcagcaggttgaagcagagaatcgcctgaacccgggaggcggaggttgcggtgacccgagatcacgccattgcactccagcctggacaacaagcacaaaactctgtcttgaaaaaaaaaaaagctgtaatgttatattggctgatagtctattgccagagagtttgctttaagaaatttgatggaatgaataggtgagtttgaataggtctgtttggttttgtttggcactgtgaacaccttttgcttcctgttattgctctttcttttatacatttcttataataccactgattcaggaatgttctgcaattatgtagcatttctgtaaataccagtgttagtgaaataaaagcattctggctgaaagtccaaaatctctcctttaagttctgatgccagaatctccaggttacttacttgacccaatataccaaataaggtagtgccctttttcctcctggggcagcccggttcttctgaaaggtagtatttcccagcctcttttgagtcatggtacacgtaggagattgcagtatttttatggcacactgggaaaatcagttgcttatagctggagacattggagcccctaaggctggaggtcactttccaaccagagctgtgctggagtccagtaggtgggaggctgtgctttgagggactaaaggaagcctgtatcttgtggtgagggttccacctcacaagttacagatctcagttccatttggctctagcagcaatgtggccacttctgttgcggttactctttcttcacctttttcttgccaaaaataaacttatctttaaatgaaaactaaattatttcttatattttggtcctttgttatagctgagattgggaatttttctttctttcttgaatccttacttccctaccctgcctccccaccaatggaaatctgtgcttcataagcattttagattccagaaagctctttaggttaaactacaaccctctcacctcaaagaatttgtgggccagggaagtcagtgacttatgtgaagtcttgcggctaattaatggtagagctggagttaggacacatgtctcacagttcctagttcgttttgctttgatgtgcttgaaattcagttttgacattaatttttctggatactactcccataaaatgttctttgaaaaatacttgcttctttctagtttttctcgcctggtttaaatattgtcctgagtgtgggaaccccataactgtcttgtgggttagaatttagatggaaggatttggggccctgtctctagtatcataagacatttaaccttgctgcttttttcttctaggttcactctttgaatttcctggataagagttctggagatggcagcttattggacacatggattttcttcagatttgcacttactgctagctctgctttttatgcaggagaaaagcccagagttcactgtgtgtcagaacaactttctaacaaacatttattaatccagcctctgcctttcattaaatgtaaccttttgccttccaaattaaagaactccatgccactcctccatatgcctctggctctgtttttattctttgctggtatcagaatcctttttttctcttcagtcctctgtgctgaactctttatgagttggtaacttacagctgtgaacctgcctccttgttttcattaagtatatttgaagttaatggcaaaaggcagtgctgacaaccctgggaaatggcagtcctttgtcttcttcctggagcaggtaatcctttactaatccttcgattgttacaggtgcttccactcttatgacagtgcattcctggaactgcatcattatgcactctgctagaaattgaactaagtatgtgctaccacatttacatctgtttcaacatgttttagtggtaaaagtgaaatatatttctcttaggcagtgtagacagagtgaaaaatgggggttatgtatgtgttgacttataagatacaatattttccaaagcaccttcacaaatattctctcattttattcttgcaattatcttaggggttcctgtcctcattagttaggtgaagaaattgaaactcagatttgtgacttgcttaagatcagagttcatgacaaagcttgggtggaatgtaggtctgctggctgaagtctgtcatgttcgcagccctgttttcatcttgggtgctgttgggttgctatatatggggcggaagctatgttgagaatgccactacttaaatttagccaactaccgagaatgatgagtttcaagcttctccaacttggctgcacgttagcatgacttgggtaatgtaaaaagaaaatcccaacgtccaggccacaacccacaccaattaagtaaaaatcgcttggggtggcttctgtagtttgtaaagctacccaggtgattccagagcacagcaaattggagaaacactgctctggattcttgctactcaaaatgtagtcattgactaccagtattggcatcgcctgggagcacaggcctcaccccaaacctacagaagcaacatcttcattttaacaaggtcctcaggtgatttatgtgcacaataagatttgagaatctctcatctacagcagtggttctcaaagtttggcatgtctcaagattacctaggaacttggtgaaaagcttgggcctgtatgtttcttattagctctctgcctaactgataacacactgagtcaggagtccgcaagcttttccttaaacaaatgggcatggctatattccactatcactttatttataaaaattggttgtggctatgtgggtcatggtttgccattcttaagtgatactagttcattgagattatgactgagcagtttaatctgcacttttttttttcttttttgtttttgtgagatggagttttgctctcgttacccaggctggagtgcaatggtgtgatctcggctcactgcaacctccgcctcctgggttcaagcaattctcccaccccagcctcccgagtagctgggattataggtgcacaccaacatgcccggctaatttttgtatttttagtagagacagggtttctccatgttggtcaggctggtctcaaactcctgacctcaggtgatctgcccgcctcagcctcccaaagtgctgggattataggcgtgagccactgtgcctggcctaatctgttttaaaacttatatacagatgtcacagaccctatcaggaggcttccggataatttttagtctagagaaattggaattttgaataagaaaagcatctggactttgagacacgggttgaaaactgggaataatagtaattttatgaaggaagacattgtaattgcagtctttaatacataggttttgtttaatttttcataatgatcttgagatacatgggacaggtattaaattcccatttaccaggtcagctattgtctcagaggttgtgatttacccaagccagttaccatcaacaggaaacattcttctttggtgtgtcttttcaatatttgcttcggggctaaaacctacagactgcttttggagtgttgggattagatttagttaaaggctcattataggtaactcttgtttttatgcttctgttgatttgctttatggttctcaatttgacatgtactgaagaattagctgtggacctgtgagtagccgctgcactccagcctgggcaacaatgtaagaccctgttcttaaaagaggccaggcatggtggttcatgcctgtaaatcccagcactttgggaggccgaggtgggtggatcacctgaggtcaggagaccagcctgaccaatatgatgaaaccctgtctctactaaaaatacaaaaattagccaggcgtggtggcatgagcctgtaatcccagctactcaggagtctgagacaggagaattgctagaacctggtaggcggaggttgcagtgagccgagattgtgccattgcactccaccctgggcaacagaagcgaaacttcatcacaaaaagaaaaaaaaaaaagacaacactgaaaaagcgccaggtgctcagtggcttacacctgtaatcccagaactttgggaggccaaggtggaagaatggcttgaacccaggagttcaagaccagcctgggcaacacagtgagtccctgtctctacaaaaattaaaaaaattagctgggcgtggcagtgcacctctgtagtcccagctactcgggaggctgagtttggagagtcacttgatcccaggaggtagagactgcatgattgcaccactgcgcttcagtctgggcaacagaacaagaccctgtcttgaacttaaagacacacccccaagccccattgcgtttctgattcttaggtgttttttcagctgaagtatgttgaaggagttgattttgagtactactgcatggagagtgaggtagaccctagcatttcctgctcccccttgctcaacacctctatggggtggtttatttttattttctgtgctcttttatggggccggaagccattcaccacaaacactgtggaaagtctattccctgccattctttgcagtggtgggaagcccagccctgagcacctcctgcccacacatttcctggcccctatcacatggaaaccatctctcttgttttcttctcttagcagcctataccttcggcctcttgtgatcacatcatttcatcttgggcttcaaaacacttttgttgtgatggctagaaaatacttggggaggtcacagaggcgtgctccctggtgttggaggttatagaggccagggagcttgtttgcaaacttagcgggagactctgctgctctcctatcttgttgggttgcagctcagctctgggcgtctgtaataaaagtttgtgtgtgaaatgacttaataactacggttaatttaaaagtttttaacaaatataaaaaatagatttctcctgtgggagaaaacactttctagaacaaggatcttagaggagagagtaggaaaaaagtgggaggaagcttatgaagaaggactaaacaaagtattttatttgcttacattgattttataggtaggtccaagttctgtcaatgggatttttaaaaagtattttcaaaccaccagagaggcagcctggtgttgcggaaaacactttgatctgaaagtgttgattcaaggacttgttctgccacttactgtctgttgaccttttgtcgctaaaatttagcaaataattacacacttaggctctgtgctaggtagtgcatggcattagaaaagataagacacagccctatcctgtccaggagtgagcgagcgtgggccacatgtctggcaaactgttaagcgccctcctgttacttgcgtttccctatcattgcatgaaggaggtgggtggcattcttatcttcctgatgaggaaatggagactcagcaagtgttaggcttgaatcttatttctgtctagctgaaagcgtttgggttacgctttgaatgagataagtcataaactcagcatggggataataatacttcatactgtggttatcccaacaaaacgttaagtgaaaatatctgaatgtaattgctctacaaatgtatcattcctttcagtgctcaccagaagctctgagggttccatgacatactgcttttctccctcagctgcacatccgtttcactgactttcagctaaagcactgtggtgaccaatggcaggcctggctcttcctgggagaagcggagagacctccctaggagccccgtttgagacctgctattcaggcctgttaaatcccagggataaacaactttgtttttaacttttaattgaaattttccctcatgcctgcgtatacatgcacgtcaagaggccagcaagctcccatatgtctaacagcttcaatgattgtcaacatttaaccccaatctagtgtcagggtataaataagagacatctgatggcagagctcattctttctgttattactccttcctttaaatttttgcttaccatgaattaagtgctacagaaatgatcagaacggacaaggcgcctcactttctgagccttaaattccattagggaagagagccaaattattacataaatgaaataattttgttgtgagtggagtgaaggaaagaaacagtaaacaatataatgtgacagtaaatggggctggggagggagctgcttagggtggttaggaaggacctctctgaccaggtgacctttaggctgagatctgacagctaagaaagagtcagcgaagggaccagccatggggagtgtgtctggatattagttatccccattggcatatgcttgagtagtggataagtattgccttgaggccacaaacatcaatttttttttttttagatggagtgttgctctgttgcccaggctggagtgcaatggcgcgatctcggctcactgcaatctccacttcctgggttcaagcaattctcctgcctcagcctccctagtagctgggattacaggcgcccgccaccatgcccggctaattttttgtatttttactagagatggggtttcaccatgtttgccaggctagtcttgaactcctgacctcaagtgatctgcccgccttggcttcccaaagtgctgggattacaggcgtgagccaccgtgcccgacaacatcaaatatttattgagggagtgcctcctaaaggtacagagctctgccttgccattctgatctcatcctgaagggggatcaaatccatgcaggcagagtcaggaagagggaagggccacggaggcaggaaacaagacacttagtcttagggggcctgggaatgccagtcaattcatgctccttcctctgatggctgaatctggaaccacttggtatttctgagtccacagagcttggtggaaagcctgggatccgagtctggtggggatcagggcctagttcaccgtgatcctgtgcaagccgctccatgtgccttctgatttgtaaaaggggagagaatactctgtctaccactggggtttatcattttgatcaaaagagttgatgtttgctttggtgttgtacagatgtaggatattgttaataaggagtccagataaggatgtcgttccacccatttcccttggtaaatcactggaataacttgggtcagcaaggataaggtggacaccttagaggttggtaaaaatagaatcttgcagcctccactggaaagaagtcccttttaaggtttacctactttcctcccatcaaggctggaagcatgaaatggagaccaggtgctccccattatgtaaaccatattccttcatctacctagactctcttaggtcctgccagccttgtcttcttacacttatatgatcttcctctaatattttccttttttgttgttgttgttgctaaatttcatgtgggtggttcggggaaagggtagacttgcactcctccccactaatcagtgggattttaggaaggctttgaaaatgggaaggatcctcccctcagatcctatcacctttggaatgggaacatgcccacatttccagagcgaacagacactggagtcctctcttctcaaaggtggcgaaccgtcctggagtgacgtggcgtgttctggcctgcgaggagatggctgcccgcagaacctgcccgctggagggcgctgcagaggtctggctccgtgctttcagatgtgttcggccaggggctccaggggctccttctgaaagcagagaagcccccagaggttgagaggggagataagacgtgagccttttcagctgtgatgtggtgaggagtcagggaggccgtgagcactgtggggccagaagtgttggcttctgtcagaaactcggcccagcctgaccgctgcctcctggccctgtcatttcccctccatcacgcgcttccttctggaagccggaagcaggaggtgggaagctgcggaggtagtgacaaaatcatggtgtaacaagaagctcctagggccgaagtgactggagaggtggccacatactatgagaaacaccagcgcaccggcagggcctggggagttctgagctctcccgggctgtgtgaagccgcagccagcccacttttttctcagtatggcagtgccatctgacctggcccagcccatcttgttcgggtcatggttcgtcttcctgggcattctgatgcattcccacttcatatttgcactgggatttcagtttactaagcattccacacccattactgctttcaatcccttcaacaacactgagaataggtgggcaggtatttttatctctatgtgaataataacacatggggactcagaaaaattaaaggccccaggagagaaggctagtgaggggcagtgacgcttagggacaaacaactggttctcctgcctcctgcctgaggactcctgcctgaggagaatatagtaacaaaagcctctgtcttgcaattgcagccattaacacatctctttcatacccactactcactggactgttaactccttgaagacagaaactctgtgtgtgtgtgtgtgtgtgtgtgtgtgtgtgtgtgtatttaatgggagcagtactttcttgaggcataattacatgaaaatacactaatgatgcatttgatatatatatagccatcacccaagataaagatatggaacatttccaccacccctgaaggtttcctcgtgccccttttcaatccatccttctaccccagaggcaaacagtgccctaatttctatcacctgtgatgcgttttgcctgttcttggacttcatctgtatggagtcatagtttgcacagagactgaatccccagagcacgacacagcctggcacatggcaggtatacaatgccaaagaaagcctggttcttaaactacctgtgagagagagttcgtcccaccgggaaactgaggcggtgggcggttagtgacctgccaaaggcacgagtgtatgatgtggtggatcccggactccagccagcctaattccgaacccaaggcctcctccgggcccccagccctccctgggcacttcctccggggctccgggtggagcgggtctgacgatcccggacgaacagcgccccctgctgccggcccaggccccaggccctcctctcctttcggggggatgtgacaggatgacacaggccttgcgcccagcgcagtgacgggcacagggcagggacttgtgggataaaagtcacctgcccttttattttcctcggaaaagagcttttcctaaactttgggggctttctatctccagaattaacagacaaagggagaagaggtctttttggtggagcgctgctgcccccatgcgggtggatggcgacactaccgaagagcaggcgatcaagcctggtatttttgggtttcaggttctgcggctccctgagacctgcagattcctggtctccgggtccctgggtcccggacgtgtccatcaaggcgtccattagggccatcacctaatggacaagcatcagggtaaggggggaggtgctattgggggggggtccctcagagaatcagccctagctctgtgtgggggcaaatacggcctccccacctccctccctcccaggagacactggcctgagcataagtctcgagggtctgccctgtactaagcaagcgcttaatcaggtgagatcaaggtctgatcttggctggtttggaggggcagcagaggtgcggtgagggaggcggctcagcggtggggccagcagcacctccccagcctgctgcgggcccggtgcaagtcaccgaggggccggcagcccctcccagcctggcatgttggccttgctgcacctgcggttggggggtggtgtaacggcccagcctgctcccctcggcacgtggcctggggcgatgctatctctaactcagtattttaaactcttctttccagaggatgtggcttctgcgggagagcttcaaagggtgccctacttgcccctcttggtaaccatgacgtcatggaaatgggaggggaccgccccagcccccaaacacctggagggaagtgggagactttttccacttcctgttctacttgtggctactgactcaatgtctgacctgtttattaattgcaaaatatagctctatgtgtgctacccagagaggcctcaggcctgtgtgtctctgtgtgaaaggaggcctgcactccccacccctcgccgcgttgcccaggtggccttgacacagacgcagggcgctggtggtcctgcagccttccggcagccagaatgacagcactgggtctccatgtgcttgctcccccagactcatcccagtcagaagctcgtcttcccacacatggctcacggaggtagatgggttttagagtaggactcatggagaaactgaggcgaacccacataaagtgactgttggctctggacctcagtgtggtcacacagtgaggtcagactcccaggtaccctgcgtgatttaccacagtccctgtcctccaggctttgttggatagatgtgtgcctgcctgggggctgccctgagcaaggggccaccactcaggctttccttgttctgaagttcttgacaagttactttagctcttggcaaaactgtgaagcattgactcacctgaccacttcctctactaatccccactttcctttctcctgtactccccactcctcacactcagctccccccacccagagcctaactgcaggagtcattcacttattcatttaacggcatctgttgtgtgccaggcactgttctagttcctggggacacattgatgacaagggacattcccatcccacagagcacacaggccaggggacttccacactaggatggtacctgataataaggtgctataggcctgtctgtatacgtgatcccaggggagttgaattttatgtttggacctaaaaaataagcaactccttaagactcagatggctgcccccagtgagggtagcagcagaggggttgctctgtcagagctgaagacctcaccaggatgctcctgaagcacgtgcttgcatagcctgccctttctcctgagtggctgtgactccagttgcactcagaggtcaagtcttcaagtgaagtttcagagagtcctctagaatcttagggctggggccacaagagctcatttagtccattcttctgcctttgggactggcctgtgcttaagtcttttgggagagtagggcatgtgtccagagaagtcccttctacaactggccttagtaacatgttccctgctgggatgtcggcctgaggttgggtccaggctggtagagctgcagctgcagctgcagcccaaggccttggctcgcagggtctgtgggtcttcatggccagtctcttcatgactgtgttttccaggtctcctcagctgcctattccctccaggctaagcaatgcccagttccgtatagctgggccctctgcactgaggggctttgctgtggtggcgttaggcccagtgctgacctggccggtgggcacaggagcccttctcctgagcctcctcacaa

SEQ ID NO: 227 - DNA, 699 bp, Homo sapiens
catccggtgtggtcgacgggtcctccaagagtttggggcgcggaccggagtaccttgcgtgcagttatgtcggcgtcggtagtgtctgtcatttcgcggttcttagaagagtacttgagctccactccgcagcgtctgaagttgctggacgcgtacctgctgtatatactgctgaccggggcgctgcagttcggttactgtctcctcgtggggaccttccccttcaactcttttctctcgggcttcatctcttgtgtggggagtttcatcctagcggtttgcctgagaatacagatcaacccacagaacaaagcggatttccaaggcatctccccagagcgagcctttgctgattttctctttgccagcaccatcctgcaccttgttgtcatgaactttgttggctgaatcattctcatttacttaattgaggagtaggagactaaaagaatgttcactctttgaatttcctggataagagttctggagatggcagcttattggacacatggattttcttcagatttgacacttactgctagctctgctttttatgacaggagaaaagcccagagttcactgtgtgtcagaacaactttctaacaaacatttattaatccagcctctgcctttcattaaatgtaaccttttgctttccaaattaaagaactccatgccactcctcaaaaaaaaaaaaaa

SEQ ID NO: 228 - DNA, 342 bp, Homo sapiens
atgtcggcgtcggtagtgtctgtcatttcgcggttcttagaagagtacttgagctccactccgcagcgtctgaagttgctggacgcgtacctgctgtatatactgctgaccggggcgctgcagttcggttactgtctcctcgtggggaccttccccttcaactcttttctctcgggcttcatctcttgtgtggggagtttcatcctagcggtttgcctgagaatacagatcaacccacagaacaaagcggatttccaaggcatctccccagagcgagcctttgctgattttctctttgccagcaccatcctgcaccttgttgtcatgaactttgttggctga

SEQ ID NO: 229 - DNA, 29956 bp, Mus musculus
  misc_feature (1335)..(1858): "n" at positions 1335 through 1858 can be any base.
  misc_feature (7091)..(7110): "n" at positions 7091 through 7110 can be any base.
  misc_feature (20085)..(20586): "n" at positions 20085 through 20586 can be any base.
  misc_feature (24372)..(24840): "n" at positions 24372 through 24840 can be any base.
  misc_feature (29121)..(29589): "n" at positions 29121 through 29589 can be any base.
tctatggcatagacagacacagtgaactgggtcattttggcatagacacagtgagctgggcctcagtcacacttagattgagtaagatttctccatctagaagctcccataatgcaaagtggacccagagttccccaaggcaggaaccactattaaggtgctgagcacaatatatcccttaccaatgacagttgtaaccaaccagaagcagttctgtgtttcagccagcccgtgtttgaaagagtaaagctgtcttttttttttggttttctgagacagggtttctctgtttagccctggctgtcctggaactcactttgtagaccaggctggccttaaactcagaaatccgcctgcctctgcctcccaagtgctgggataaaaggcgtgcgccaccacgccaggcgagtaaagctgtcttgtagctgagggtgtagcttggtggaagagtatgcacttattatgtgtgaggccttgggaatgggctagtgacctcagctgccggggagggtcagggacgaggctcccctgggcaactgagactctgcttcgaacaaacagaaaatggaagggttcgggatgtggagagtggtggcactaccctcctttaaccctgtacccaggcagcagggacagctggatttctgtgagtttgagggcagtatatggttgacttactaatctccaagccagaacacatggctaatttaccagctagcaagcctttcttatgcctgccagcctaacgttttggtatcatgatgaggtttatgtgggccgctcccttctcggaacacatgcaacttggagaatactcaaatcttgactactaaagaaaaagtcaggaaactgttgtgacacctagtagcttgtgcttcacaatgaccaagcacacgtgagtggtctgccacagactggccttcctatattccccatttgtttgtttgtatgtttgtttatttttttgacatctgagacagggtttctctgtgtagccctggctgtcctggaactcacttttgtcaacgaggctggccctgaactctgagatctgcctgcctctgcctccagagcactgggatcagaggtgtgtgccacctctgcctggcttgcctagattctatgtaaagcagtagtcgaaggcattcaggccggaatcccagtacacattccagacaaaagattcataaatctgcaggtttgctgctggcgcagaaaaagagctgatagccatgaagttggcaaccatggccaagtctacgagagtcggaactcagttagatgtgtttgacaattctggggtcaagccgggcgtggtggcgtacgcctttaatnnnnnnnnnnnnnnnnnnnnnnnnnnnnnnnnnnnnnnnnnnnnnnnnnnnnnnnnnnnnnnnnnnnnnnnnnnnnnnnnnnnnnnnnnnnnnnnnnnnnnnnnnnnnnnnnnnnnnnnnnnnnnnnnnnnnnnnnnnnnnnnnnnnnnnnnnnnnnnnnnnnnnnnnnnnnnnnnnnnnnnnnnnnnnnnnnnnnnnnnnnnnnnnnnnnnnnnnnnnnnnnnnnnnnnnnnnnnnnnnnnnnnnnnnnnnnnnnnnnnnnnnnnnnnnnnnnnnnnnnnnnnnnnnnnnnnnnnnnnnnnnnnnnnnnnnnnnnnnnnnnnnnnnnnnnnnnnnnnnnnnnnnnnnnnnnnnnnnnnnnnnnnnnnnnnnnnnnnnnnnnnnnnnnnnnnnnnnnnnnnnnnnnnnnnnnnnnnnnnnnnnnnnnnnnnnnnnnnnnnnnnnnnnnnnnnnnnnnnnnnnnnnnnnnnnnnnnnnnnnnnnnnnnnnnnnnnnnnnnnnnnnnnnnnnnnnnnnnnnnnnnncatacatgtgtaggggcatgcacacacacaatacatttttatttattgtgatcataatattttcattactattatttgagacaagctgttactatatagccctggctggcctggaactcagtatgtagactggctttgaacagaggtccacactggcttctgaatgctggaatgaaaggcctgggtgacaataagaactaaagttggggctcgggggacacacttgcttcagggtcttgtgacagcctgatttgttgtatgtcatatgccacatgagcaaggctactactatgtctgctggccaggtggcattgtactgaagaacaccaaccaatacctaggaaccaaactccagctctgactccactcttcaagttagaaacactggggtggggtagccctttgataatgggcaaacggtgcctagtggacaagacacggctttgagttggaccaagggcattgcaagtcctactgaaagatggattagaagccacaccactgtcattattgagcaagaggtggaaaaagaggaggttctttattcataccagagtctgtcacccgccattctaagagtcctgaggactgccttttttttcctttttccattacagacaatgagaaatttacagtgttttaatgttgatctctgcatttgttgttttttaatttttaaaattttttataagattagatgtgtctatgtaccatatgcattcaatccccatggaagccagagagggcattggatctcctgggcctggacctagagttacagatggttatgagccaccgtgtggatgctgggaatagaaccctggtcctcagagagagcagccagtgcttttgacaaatgactcatcaccccatcctgagctttgatctctttatgttgaacctgttcctaacctgtttcgaccacatctggctacttgacaacctttgttttaatcctcgaccagtgaggtgggactcatgttttgtgtaaaaagaagcaccttacaatttagagacaggcatggctttgcacaccacccatttgctcacacagggaatctagcaaacacatggttttgcatgatgtaagcaagatactgggttatgtactcagacttgcattctctggtcaggtgaatgtagatctaaatgcattccaagtagagagagaatttcttggtgaaaaggcctttgttgacggtacaatggtcaagtgtgtgtgcttgtgtgtgtgcgtgtgtgagtgtgtgtgtgtgtgtgtgtgcttatatgcgtgtgtgcgcgcgcgtgtgtgtgtgcgtgtgtgtgtgtgtgtgtgtgtacataagaggggagttattttgtgacagggtaacactatgtagctctgactggtttggaactctatctgtagcccaggatgttttagaactcacaaagaccctcccgcctctacccccacgagctggaattaattaaggtgtgtgtcaccacacctggcaacggtggtcatgtttcagatgaggaatcttcacttccagttctgtgtccctgtctagcttcctttgtgatttctcatgacccaactctttggtgtaaacagatgcatgcaggggtgaacagtagaagacaaggcacctatctgtaaaagatggatgctcctgctgtcttcttgtgtttcttgtgttggtttgtttgtttgttgcttgcttgcttgttttattttgttcttttttgagacaaggtctctgtatttgctcctggttgttctgtaacttgctgtgcagatacagctggcctcaaactcaggaagatctgtctctgtgtgctgggattaaggagatgggccatgacagccagctgtgatttgcttttgctcttgccagaacccagcagtgtgttgttgggaagatcaccggacctctctaatctcacagatcttcttattacttatctattggctggtgcatgcattttaaaaaactatgtgtgtgtgcgtgtgtgcatgtgtacatgagtctaggtgtctatcaaaggaggcagaagagggcataaaataccttagtggtagagttgggaggcaacttgttggaatctgggagctgaacttgggtgctctgcaaaagcagtatgagttcctagttgctgagccatctctccagccctctgtgtacgcgtctgttcgctgtgtacacatgtgtaagcagacgcttcggaatgtttatgggtgtggaggccagaggtcaggcgccatgggttttttctttccttttattgaaacaggatctcactgtgtagctctggctgtccaggaactcactgtaggagaccaggcagctggcctcaaattcacagagaaccatctgcctctgtctcctgagtgctggggttaaggacaggcgccaccacgcccagacaaagtgtcattctttttttttttttttaagatttatttatttattatatgtaagtacattgtagatgtcttcagacactccagaagagggagtcagatctcgttaccgatggttgtgagccaccatgtggttgctgggatttgaactccggaccttcggaagagcagtcgggtgctctaacccactgagccatctcaccagcccccaaagtgtcattcttagggaactgtccaccttgagtttcaaggcagggtacttcatctgttgctctgtggtaattttgtctggccggtgagcttccaaatgacaccatctcgccaggccttccacatggaaacacaggactcaggtccccttgctgtgctacaaacattttcctaactgagatgtcaccccagccactgtcttctctttaaaaatctgtgtgcgtgtgggtgtgcatatgtcatagtgtatgtgtggaggccagaggacaaatggtaggcattaggactctctcgataccatgtcccagagatcaaggtcagatcctcgattaggtggcaaggaagattacctcctgggccatctcactggctgacaaccccaccctcttccctttaacatggagtctcactctgcacttcaggctggcttaaaaatcactgctatcttccttcctcaacctcttgagtttaaaggtgtataccaacactcctgattgattgattgattgattgattgattgattgattgatttctttctctccttttttttttcttttaaagatttatctattatatctaagtacactgtagctgtcttcagacacaccaaaagaaggcatccaatctcattacaaatggttgtgagccaccatgtggttactgggaattgaactcaggacctctggaagatcagtcagtgctcttaaccactgagccatctttcgagtcccctggtttcttttctttttgttcttttgtttttttggtttttgagacagggtttctctgtgtagccctggctgtcctggaactcactctgtagaccaggctggccttgagctcagaaatccgccagcctctgcctcccgagtgctgggactaaaggcgtgcgccaccagacccggctctggtttcttttcctttggttttagatagcctctctatccaatgctgcctcagactacttgatgataagattacaatttttttttaaagatttaattttatttatatgagtacactgtcttcagacacactagaagagggcatcagagccaattacaggtggttgtgagccaccatgtggttgctggaaattgaactcaggacctctggaagaacaatcagtgctcttaaccacctcgagattacaaatttgtacccatcatgtcctgcgacacaattatcctacctacctatctacctacctacctatctatctatccatttatgtgtatgtacacctgtgcattgcatgcatacacaaggaaccccagcatgcatatggaagtcagaggacagtgttgtgaagattggttctctccttccaccatttgggcctcagggattgaactcaggccctctggtttggctgcaagcacctttacctgctgaaccattaagcaggccatatacatacacacacacacacacacacacatatatatatatatatatacatatacatacacacatatatatataatttaaagatttatttatttatttatttatttatttatttatttattatatgtaagtacactgtagctgtcttcagacacaccagaagagggcattggatctcactacagatggttgtgagccaccatgtggttgatgggaattgaactcaggacagcagtcagtgcttttaacctctgagccatctttccagccccagagtctctttatatagccctggctgtcctgaaactcactctgtggaccaggctggcctcaactcacagggacctacctgcttctgcctcttgagtgctcaaattaaagttgtgtgccaccatgcccagtctaggccccaatctgacagataccaggtactttatgaaaggctagactcagtccagaatatatttctttcctgaatgctctcttagctcaaaaccaacatcttctccagtctctgaagattccttctgctccgtcttctcgatttccttcaccgctgtataccatccgtagcatattattactattattattattattattattattactgatttttggcagcaagggttcctaaccaaggagccatctctccagcccctgaatcaccctccttaaccccaaacttatctctcggtttttcttttgttcctttgagacacactgcatatctcattggcctgaaactcaccatgtaaaccaagctaacatagacctagtagaaatctacctgcatctgcctcccaggactgagagctcaggctaaaggcataaatcatcacacccagtctctcttgctttttcccacagcttccaaaaatgtcagttctaaaacgtaccttactgctctaattacacagaccatcttctgtgggtacttcggttataggttaaccaacctgtgttttcctagggcccatgtaaatcacaaacaggatgctcactcactccccactcttcttctgggagttcctatcactgccagccgctttctggccataagataactgagctgataagacagcaattggagccctgacaagccggcttatggcctcgctgccatgggtggaagaaagagtgaatgtgtttgggtattcctttctttctttctttctttctttctttctttctttctttctttctttctttctttcttnnnnnnnnnnnnnnnnnnnnctctttctttctttcttttccttccttccttcctttcttcctttcttccttccttcctttctttctttctttctttctttctttctttctttctttctttctttctttctttctttctttctgttttttgagacagggtttctctgtgtagccctggctgtcctggaactcactctgtagaccaggctggcctcaaactcagaaatccccctgcctctgcctcccgagtgctgggatttgtgtactcgtttcttgagtctccccctccccacttcaagtttctgaggcaaggtctctttgtatcccaactaatcttgaagccctgatcctcctgcctccactccagtgctggaactacccacatgcagcacacatcaagcccaagtctattcagtgctggagatttgaagcttagtgtatttggcaaagcactatccactgagctacatccacaacccctctgaagaagtgtcttgatttggcttatttctccatggatgttgtattattcacccatatcggtacacattgtttaaagtccaatacccaagaggaaagcacactgaaagtcccgggacccgtgagatgctctgactagctcagattgtgagcctgaagagggttactctccagtcccattttctcacagtcccatgcaggggtgggtaaagttgcagggtactggtgggggcctttgcaaactctcgtaaactgagctaactaacgtatgtagggtggtgaaaaggagttgacaatctcagtgacaggtgacaagaaggtttggacaaaatcaggcacgctattgttatcttactgttttatgttttcaggggtttcgttcttgatccattgagtttctgagagaggatgtcatggaatccaggctggtctcgaactgatcttgaacttttgatccagcctctacctcccaagtgccaggaccacagacctagctggacgactatgtctagaatacagctaatatctgagcatagggccttcagattcttcagctgggtcttctgaattttgctaaccagatgtctcccctgctattacatccacttggacacagcataaattagcaagtcttgttttgttccactgcaaatgtgtggctcaaggcgggcctccccagggcttgctttgatcttctaaaatcgaaagtcaaagctcagtaggacactgtgcatccagctacctaagatgctgagcagaaagtctaattgaacacaagagtgctggaccagcctgggcaatacatggaaactctatctgaaaaataaacacataaacaaacaaacaaaaccagaggttagacctctgtaggtgggagaatctgtgcttagtctccaggacccagtgatgggtgttgcaggcgtctgagcaggtgacacacagtttcaattcttgtttgtttgtttgtttgtttgtttttcgagacagggtttctctgtgtagacttggctgtcttggaactcactttgtagaccaggctggcctcgaactcagaaatccgcctgcctctgcctcctgagtgttgggattaaaggcctgtgccaccacacccagcttcttcttttttttttttttaagatttatttttatttatttcatgtatgtgactacactgtagctgtcttcagacacaccagaagagggtctcagatcccattacagatggttgtgagtcaccatgtgattgctgggaattgaactcaagacctctggaagagcagtcagtgctctttttgtttgtttgtttgtttgtttgtttgggttttttttttgagacagggtttctctgtgtagccgtgtgtgtggggtagccctgtgtgtgagtgtgtgtgtgtgtgtttgtggtatgttgcaaaatagattaaacaactgagagatggaataggtcttcttgacatcaaaaacatgatcgtgaacccctttattaaatctaacactcagagacaggagcatctctgcaggtttgaggccagcctgctctacagaatgaatttcaggtctcaaggtcagcttggtctacaaagtgagtttcagatctcaaggccagccaagactatgcagtaagaccttagctaaaataaataaataaataaaataaaataaaagttaatcttcgcttggcaaaccgataattgaggaccagtgctcaggaaggaggcacacgggaattccagaggctacagagggagcctcgctctgacctggttagagcaactctactttactggctgtgtctatgaggttctgcttgatttcatttgacaaaaagtttccacagctaaaccaggcaagggagccgaagtagacacagccacccgggccgcgccaacaggtttctctctgctgctgagaagcaaaagcctgtttgaagaaactctctgaaggagactgtggttgagtggtgggggtaggggtgctggggttgggctgaggctgagggttgactctaaggagctggaacctctcagcttcggtggctaggcaggggagttgtaatgaagagggacaggtaccctccttggtggaggagggtggaatgaaactctcggtttcccccagaacttggcaaagtgtgtgtgatgtctcccaggtagtcccccaaaggaggaggctagcagagctggggaggcaggaagtgggtaactagactaacaaagatgcctgcctgtggcggtttgcccatcccaggtgggagggtgggactagccttgggcctgggcctcctgtgaacttggtgcttgagggctcagagggaacccagtcaggagcttgaatcccacgattcagcgcttctgtctgcggccaatgggggcctctgagctgacgatctcgggtactttttgtaacttccagaacagggctctaggatgtctgatgttggggcgagtggcttagggccagctccttcaggcctctctacattccttcagggatcatgggctgtgtctgcagctcaaaccctgaagatgactggatggagaacattgacgtgtgtgaaaactgccactatcccatagtcccgctggacagcaagatctcggtaagaggaagatgggattagtgaagggatgggggccaggagataggattggtggagggatgggggcggaggacataagattggtgaagggatggcatggggttgaaaggttgtgtatccaggagaaaaaacctaaatggaccataactaaaggctctggaaaatagcagcactcctatcttccctagcatacatcacagaagaggcccagctagaggaagggaccttcctaaggtcaaatgtacacatagttggtgaattcagagacaaggttcaaccaggctggagaaacggaaagaagaggagaggagagggagctagggtcagatcctgtcttttttctttgaccccagcctcatttcctaccccacagctgcccatccggaatggctctgaagtgcgggacccactggtcacctatgagggatctctcccaccagcatccccgctgcaaggtgacttcatccagcagcctgtgaaacatgatacggcctggggatgcttggttgttcgtgtccatactgtcttcatcttctctccaccttgtctgcatcctgtgtctctagaattccactgttcctgtcagccccaggctggcttttcttgactcttcttatctttacagacaacctggttatcgccctgcacagttatgagccctcccatgatggagacttgggctttgagaagggtgaacagctccgaatcctggagcagtaagtatacttctaacccaccttgcctgatgtggtgtgtgtgtgtgtttgtgtgtgtgtcctcagccctcctgcacccattacaggctctggcctcagctgaggggttttggaatgtgctagaaataagtctccagagtgtttgatccaggggagtaatgatctggtctaactggggactcaggggtttccagtggctatatacgccatgatgatggtctctgtggtgcaggagcggtgagtggtggaaggctcagtccctgacgactggccaagaaggcttcattcccttcaacttcgtggcgaaagcaaacagcctggagcctgaaccgtgagcaggagacctccgtgggaatggggttcacatccagggatctcagaacagggcgtggtccggggagtaggggatgtttgactgagatggaggaagaattggacaaaggtggcacaggcttttaaacctagcattcgggagggaggggcaggcagatctctgagttgaaggccagtctggtgtacagagggagttccaggacagctagggctgcaccaaaaaaaaaaaaaaaatcgatcaaaagtcgatggtcttgtatctgccttatatagttggttcttcaagaatctgagccgtaaggacgccgagcggcagcttttggcgcccgggaacacgcatggatccttcctgatccgggaaagcgaaagcactgcgggtgagagggcttggtgggcggagccccggtgtgggcgtggctgtgaggtgagggcgggcgcctccgggcgagaagggggcgggggcggggagctgtgggaaacgggggcggtgaccacctgatttatggaaggcaatccgccacattttctttttcctcttcaacttctcttctcttccctcctcccatctccaacctttcttcagggtccttttccctgtcggtcagagacttcgaccagaaccagggagaagtggtgaaacattacaagatccgtaacctagacaacggtggcttctacatctcccctcgtatcacttttcccggattgcacgatctagtccgccattacaccagtgagctccggcggaatgcgttcacctgtgcccatcctagcagcctctctctctctcccgcacccagtccttcttagggaccctccaaacgtctttcattccccttcagtggatgaggggtatagaacctgaccctagaccctgccggctaatgttgaatgacccacgttttccctcccataccagtcggtttcccctgcgaggaaagtggaaagagggtaggggctggagggagcatccaaggtctctagtgaccgcattaaccttctcttttgtctatgcagacgcctctgatgggctgtgcacaaagttgagccgtccttgccagacccagaagccccagaaaccatggtgggaggacgaatgggaagttcccagggaaacactgaagttggtggagcggctgggagctggccagttcggggaagtgtggatgggtgagtgtgaccctcgggactgattggaaagaggagagagaatgtgagcttcctctcacactggcctattcaggatggctgcctagttcgtcaggatcttgacctctgtaacttctccacccgtaccccatcagggtactacaacggacacacgaaggtggcggtgaagagtctgaaacaagggagcatgtcccccgacgccttcctggctgaggctaacctcatgaagcagctgcagcacccgcggctagtccggctttatgcagtggtcacccaggaacccatctacatcatcacggaatacatggagaacggtgggtgccctgctatgtccagccgcttgagggcgctattgtggtcccactaccttttggacccagggaaggaaggcgcttttacctctgatcttctaaagactcttttctgggtccctaagctttggaagaacgttccatctgatagtccctgatcttcagtttctgttcctttcttccaatgcccacctgggtttcagaatgcttgacctaagaaatggtgtatggtgcctgaagagaccagaaaggagtgtgggataccctggagttacagacaattgtgagctactggggatcaaacgcgggtcctctggaagagcagccagtgctctcaaacgctgagctacctttctagcccaaatatgtagtatgtttgttaaggatccaagagtctgactgcctggatagagttgaggctttataattgtatggctttgggctgatcccatcacggctttctgctccaaatagaactattttaatctgtaaaatagcgggtttagggccagcaagatggctcagcaggtaaaggtgcttgctgacaagcctgatgagcaggagttcaatgcctggaatccacaggagagagggaaagagctggctcttaccagagttgtcctctggtctccatacctgtgtaatggctcatgcatgtgccgcctcctatgaataaatacatgtaattaaagcatagctgcactagtggaagaactgcatctctacatagttgctatggggatggaagagcagttcctgtccagccttgcttttatgtggtttcgattgtttggagtgcaaatcttccaggaagggaaacaaaccattcattggctaatgattcctggaaatggcaaataggctttctttttggtagtttctttttttctttcttttttttttttttttttttttttttttttttggtttggtttttttttttttgagacagggtttctctgtgtagccctggctgtcctggaactcactttgtagaccaggctggcctcgaactcagaaatccgcctgcctctgcctcccaagtgctgggattaaaggcgtgcgccaccacgcccggctctttttttctttttgagacagggtttcttcgtgtagccctggctgtcctggaactcactctgtagaccaggctggccctgaagtcagaaatccacccacctctgcctcctcagtgctaggatcagaggtgtttgccagaaacctgattttgataatggacactgagaaaagcagtttgtgacctagggatgttcccaaataccccaggaatgtagacagtgaagatattttcctttctctttctttctttctttctttctttctttctttctttctttctttccgtctttcttctttttttttttgttttttttttgttttttgagacagggtttctctgtatagccctggttgtcctggaactcactttgtagaccaggctggcctcgaactcagaaatcagcccgcctctgcctcccaagtgctgggattaaaggcgtgcgccaccacgtctttctttctttttttggctcggcttttcaagacagggtttctctgtgtcctctgcctccctagcacagggattaaaggcatgtgccaccaccaccaggcattttttttttaacacaaggtttctctgtatagtcttctctgctctagaactcactcagtagaccaggctgtctttgaactcacagagatccctccatctctgcctcccacctccccagggattaaagctgtgcatcaccactccctggcctctttttgttgttattgtttttttgtgggattttttttttggggggggggatagggtttctctgtgtagccctgactctcctggtcccgaactccaagatctgcctgcctctgcctccgaagtgctgggattaaaattgtgtgtcacagttgctctgctaattagctgaaggaattcatgacagctggtaggaacagtgtagaagagtggtccagctgggcaggaaaaggaaaggagaaacttctagaagacaagaaatgaagcaaagagactttgaaggaagagtctagctatctgtgtggagaatccaacaataatctgtgatagagaaagtcaggtctctgggaagaagacacaggcatgaagcatgtcagcttggctgctgtggagatggggctctgtcttaactggaggcaagaagcctctggatcctctgctcatatcccaacctagccctctggaaaaggccatcccatatgctgagcatcccctccttgtgcacagcatcccccttgtgcacagcaccccccttatgcacagcatccccctcttttgcacagcatacccccttgtacacagcatcccccttgtgcacagcaccccccttatgcacagcatccccttatgcacagcatccccctcttgtacacagcatctcccttatgcacagcatcccccttatgcacagcatccccctcttgtacacagcatctcccttatgcacagcattcccctcttgtacacagcatctcccttatgcacagcatccccctcttatgcacagcatccccctcttgtgcacagtatccccccttgtacacagcatcacctccttgtgcacagcatccccctttgtgcacagcatccctccttgtgcacagcatccccctcttgtgcacagcatacccccttgtgcacagcatacccccttgtgcacagcatccctccttgtgcacagcatccctccttgtgcacagcatctcccttatgcacagcatccctccttgtgcacagcatccccctcttgtgcacagcatcccccttgtgcacagcatctcccttatgcacagcatccccccttgtgaacagcatccctccttgtgcacagtatccctccttgtgcacagcatctcccttatgcacagcatccccccttgtgcacagcatccctccttgtgcacagcatccccccttgtgcacagcatccccctcttgtgcacagtatccccccttgtgcacagcatctcccccttgtgcacagcatccccccttgtgcacagcatccctccttgtgcacagcatccccccttgtgcacagcatctccccttgtgcacagcatccctccttgtgcacagcatccccctcttgtgcacagcattccccctgtgcacagcatccccctcttgtgcacagcatcccccctgtgcacagcatccccctcttgtgcacagcatcccccccccttgtgcacagcatccccaccttgcacaagcattctcttcccttgctcacatcatcccccccttctacccccaagcacacactttttctcagtcctcattcttccttgccacggtcaggcactgcttccagatcctaggtggatctaggtggatcctaggtggatctaggtggatcctaggtggacctaggtggatctaggtggatcctaggtggatctggaagggtctacgggcttcgtcctgggcaatttaagtcaacaactcttgcttttgctcacagggagcctagtagattttctcaagactccctcgggcatcaagttgaatgtcaacaaacttttggacatggcagcccaggtaaggagccgggcaaagggctgggtatggctacagatcagtggggtaaggactggtgacctattcctggcctgcagattgcagagggcatggcgttcatcgaagaacagaattacatacatcgggacctgcgcgccgccaacatcctggtgtctgacacgctgagctgcaagattgcagactttggcctggcgcgcctcattgaggacaatgagtacacggcccgggagggtaggtgtgggatagagaggaggttcatggccagcaggagagcaagcacacacagggggactaactttgcttctctctaggggccaaatttcccattaagtggacagcaccagaagccattaactatgggaccttcaccatcaagtcagacgtgtggtccttcgggatcttgcttacagagattgtcacccacggtcgaatcccttacccaggtgagctttccttaagacaagcaactctaagtcttcaaggaaggggagccaagccataccttcctgctcacctctacccaggctcagactctgaaactctgagttgcttctctcccatccacttgggcctgtgactccgaaatcttctgttagatgcttcattccatctctgcctctgagtccccacacttctcaaaaactccagttcttccttgcttggttatggcagaggccacctagtatgtcagaggtggacaggaggtaaaaccttcctctttctttctctctctctctctctctctttgtgtgtgtgtgtgtgtgtgtgtgtgtgtgtgtgtgtgtgtgtgtgtgtgtgtgtgtttgaggcaaggtttctctgtttggccctggctgtccaggaactcaccatgtaaaccaggctggcctcaaaactcagacatccatttgtctctgtctccaaaatgctgggattaaaagtgtgccaccactgcctgacctccagtttcttaataggagatcagaatagtgcttaggccacactaagccattactagtcattactctgggtacgttatgttgccctctgagcctcagtttccccatacatagaacaagagactttgtgaaacacttgcatgggagctgcttagtaagcactggtgctttcctactgagatgtcacagctaaagagagaaaccatgtagatccctccttctaggaaaggcccttatcacgattttattgaatgtttgttttttagccattaggtttttttttttttttttttttttttgggagacaatgtcttacatagcctaagctgacctctaacactctatgaatctgaagatgtcccctgagctcccagtattcctgcttctgcctcactgggaggtgcttgtattacagcaagcatgtgcctatgtacctggggatcaaacccaggtcctgtgcacgcaaggtaagtgcgctgcccctgagccatgcttctaagcctgggggtgggatttttctagaaggaatttgataacctctgtggaaagaaaatgccacagaaaagagtaggaggttatagagttcagaggtcagattggcagaaacttcccacaggcccagggcaacaggcattgaaatttgatcccaggaatgtaaaggcactttgaatctcacagttagaggctagaagagttcccagctctgggcttgttctatctcacagcccagtattcatctcctgtgcctaggcccaaaagctagaaatacctcaacactgccctggctgtgggcttttatcccatcctgagccctgactaccccatctttgccatcaaatacgaacaaccccaggtacaccttataaaagaacacccctagtcaggtacctcttatatacactgattccttcagtcctcgttaaaactcggtgattcactctatgccagaagaggaagccgaggaggtggcccagtcaaggtcctgcggctggcatgtatgctattgagtgtgtgtaggcactataggtgtgggcctgacattcattcagcaggaaatgctagcgtgccttaccttaatgaagactagcatcaggttggattggtagttccatattctgaaccttacctgtgttggtcagcattccattactgaaaacaaaatcaaccaaagactcccaagacactctcaggtgacccaagcttgggtgacttgctgaggaagcctgatgaaccaagttcaatccccggtattcctggaaaggtagaagaagagaacctgcattcattcattcattcattcattcatatttttgattttttggggacagggtttctctgtatagtccttggctctcttggaactcactttgtagaccaggatgtccttgaactcccagagatctgattgcctctgcctcctgagtattgagattaaaggcatggtggcctgactgagatcccatacttaaaaattgttgtctgagggggatggggagactggagagatggcttagtagctacgagcactggctgctcttccagaggacctgggttcagatctcaacacccataaagcagattacagctgtctgtaattccagttccagagaatttagtgccctcttctggcctccttgagcactgcacacatgcgatatgtgtacatggaaaacacacttatagaaataaaattttaagctgaagatggtggcacacacctttaatcccagaaacacatgaatctctgagtttgaggccagcttgatttacagagttccaggacagccaggggtacacagagaaaccctgtcttgaaaaacaaaaaaaagaaagaaagaaagagagaaagaagatagatggatggatggatggatggatggatggatggatggatagatacatagatagatagatagatagatagatagatagatagatagatagatagatagatagataaaataagtaggaaagaaagagaactggagtcagtttagcatcagccttgcttttgagtttccaaagattaaagtcttgatgttttttcctccatcaacgttccaggaatgaccaaccctgaagtcattcagaacctggagagaggctaccgcatggtgagacctgacaactgtccggaagagctgtaccacctcatgatgctgtgctggaaggagcgcccagaggaccggcccacgtttgactaccttcggagtgttctggatgacttcttcacagccacagagggccagtaccagccccagccttgataggcctttcggtcccaagatcctcccaaccactgtgccctggctagggcagatggaattcctgtgccatatctgtgtggcctgtgcacacatggactctgactctgtacatgaaacctgtgcgtgtgtcacacataatgcagtttctgtcttgtacacacatctgtagttatgtgggttctacacatgtgtcttatacctgtggagcacgtgagtctaagccttggatacctcctaagatgtctcttcctataccgttccatttcctgaagccatagagaggagaaggcctgcgattgatgcgtgtctctgtctaccactgcctttcagagggtctccaggaaggccctccttgtgggctgccatccaatcttatgtctctgtgtgttctgtcctggtgcctagcacacaccaggagctcaataaaagtctgttgaattaaggttgtacatttttctactgcatactttatttctttatggcaaatagtgtgggggggggggggtcagatgatggagactggggttgctgttggatcgcccacactagattctcctgccctgagttgccactatcannnnnnnnnnnnnnnnnnnnnnnnnnnnnnnnnnnnnnnnnnnnnnnnnnnnnnnnnnnnnnnnnnnnnnnnnnnnnnnnnnnnnnnnnnnnnnnnnnnnnnnnnnnnnnnnnnnnnnnnnnnnnnnnnnnnnnnnnnnnnnnnnnnnnnnnnnnnnnnnnnnnnnnnnnnnnnnnnnnnnnnnnnnnnnnnnnnnnnnnnnnnnnnnnnnnnnnnnnnnnnnnnnnnnnnnnnnnnnnnnnnnnnnnnnnnnnnnnnnnnnnnnnnnnnnnnnnnnnnnnnnnnnnnnnnnnnnnnnnnnnnnnnnnnnnnnnnnnnnnnnnnnnnnnnnnnnnnnnnnnnnnnnnnnnnnnnnnnnnnnnnnnnnnnnnnnnnnnnnnnnnnnnnnnnnnnnnnnnnnnnnnnnnnnnnnnnnnnnnnnnnnnnnnnnnnnnnnnnnnnnnnnnnnnnnnnnnnnnnnnnnnnnnnnnnnnnnnnnnnnnnnnnnnnnnnnnnnnnnnnnggcatggggagccgttggcttactagacaaagtattatcagctaacctttaagctgattggttctgagtaaggtaaggggtggagtggggggatgggtggtgaacaggggaacttccagatcattgagataactgagaatgagtgttgtaaccaaaactttttagcttattagtagcattcctcagtgccagccacaaaaataaataaataaataaataaataaatctaccaggcagtggtgggacacacctttaattccagcacaggaggcagaggcaggtggatctctaagtttgaggccatcctggtatatagggtaagttttaggacagccgggattacatagagaaaccttgtctcatacaccaagggagaaaaaaaaaacatacagaaaaatggtttgtggagcagggtgtggtggtgcacgcctttaatcccagcacttgggaggcagaggcagacgcagacagatttctgagttcgaggccagcctggtctacaaattaagttccaggatagccagggctatacagagaaaccctgtctcgaaaaaccaaaaaaaaaaaaaagaaaaaaaagaaatggtttgtgtggtcacacaaagacagcacttgagataaggtcaactctctttgtagatttatttttatatttgtaaatgttttgcctgcaagtctgtatgtgagtaccatgtgtgtatctagtgcccttggaagcagatgttggaaatgaagttagggataattgtgtgccaccatggggtgctgggaacagtcttctgtgcgagcagcaagtgctcctaacagctgagacatcagtctaaactaccatgtctactactaaagtgtgtgtgtgtgtgaagatcatatatatgctctaaaaggttagatcacagctgctgccctgtagaacagatgagtcacagcttgtgtcctatctagaactttctctcagatgctcctagcatattgtacgatggtacaacaggatttatttcctagcttatggctttatagccaatctagcactgctactggcccaagctcagagatcccctcctatctaaagccagacatctcttacctttaaagtaagtgcaaggactgttctttgttctgttgacttctgcctgatctcttatcctaatgtcccagagctaggaaggcccagcactcctaaaggacatttcacccgaaaaacaaacaaataaagagagaaaccctgagttggggtgagagtcgggataaatgaaagtctgacctttttacaaaagtgtgtatatatgtgtgtgtgtttgtgtgtgtgcgcgtgctcagacgtgcatgtcatggtggagtcttggtgtaaaactgcatatccccagagtcagaggacaacgttagagagtcagtcctgtctttctaccttgtgggtcttgagcagcaaactcgtatcctcaaatttaagacaagaacctttaccaacgaagcctgtttcactggctcaggccagcattctttttttttttttttttttgagacagggtttctctgtgtagccctggctgtcctggaactcactttgtagaccaggctggcctcgaactcagaaatccacctgcttctgcctcccgagtgcccaggccagcattctttacccctctgatccaacttcacttcacctaaacagtaagtgtgaatgagttacctcccttttatacacggccatcagtttttttctctttctttttctttttctttttctctttctttttcttcttttctttctttctttcttttttttttttttttttttttttttttggtttttcaagacagggtttctctgtatagctttggctgtcctggaactcactttctagaccttgaactggctggccttgaactcagaaatccatctgcctctgcctcccaagtgctgggattaaaggcgtgcaccaccacacccggcttcagggcctcttgaagaacagtcagtgctcctaaccgctgaaccatctccccagccccagtggtagagatttttgtgctaaggttggagaaccttaaccttggataaagccttatgtatgcttagccaacgctccaccagttttgacattagggacacctccagtccaagaaggcttcgtttgtttgctcttgctttgtggcctggctcccctgaactcctgacttgcctatatttgggtcctgagcgccaggattacagacatgcccaacagggttcagtattttcacctgcattttaaaaataagtgaattcacttagctaatttctaaaactgggaagattttatatgtaaaactctagatctgggctgtctcttcaacaatgagaggtttggtttcctgggtttgtctgtcctagtggagcaagtactggccatccagtttagttgggacatgagttttccatccctgccagggtcccttccacccactactatcctaagccaagtgttaatagctatttatcaccaaaattggtgctgctgttctcgggataaagaggaaagtaaagaaagaaatttttaaaaaaatcaaaaattaggggctggtgagatggctcagtggttaagagcaccgactgttcttccgaaggtcctgagttcaaatcccagcaaccacatggtggctcacaaccatctgtaacaagatctgacgccctcttctggagtgtctgaagacagctacagtgtattcacatataataaaataaataaatcttaaaaaaaaaaatcaaaaattaaaaaaaagtctgagtttaaaaagttaaactcagagatggcagtatgtttgatcaaaaaagcaagaggtcatatattcctttaaggaagttaaaagctccaagctttaaaatgagcaaacaaacaatatctgagtcataagaatataaactcattcatttataccatgtgcttggcctatgcgggcatgtgaggttgtaacccttgctctacatcttataatccttcaatacccatgattctgtcccgtagtgggtactgtggacagccatggagcggggaaactttggagtcctcttctgtctacactgcaaagatgggaaaggaggcctagaaatgatgaggagacccacctaaagccagaagagtagcaggggtgtagaaatggaagtctgtgtcctggccctctgtcatcacacagcctccctgtctctaaaggccctgtgcaattcccaagggagtgacgctgagcatacaagggctgggggttgtggtgcaagcctcaatcccagcttttcagaacagggcttcattgtgtagctctggctgtcttggaactcactatgtagactagggtggcttccattcacagagatctacagtccagtgctggtattaaactcgtgtgctactatgtccaactgttgtaggaaacaaacaaacaaacaaaaaaaccccaaaaaccaaaaaactcagcacagagccttttggtggatcaataatggctacttgaagattgacggattcaggttttgtaggagcatgggagatggtggttttctgccatttagacactcccagacatttgtcaacctgtaaggacaattttgggtgtcacagtaagggcgtgtgtggggtgttgctactggtatagaagaaggccaagcagtcaattaacatctaaaaggcccgaagacagcccctacaacaaagagtgtaagtaattcaaggttaagaaattttgctggcatggtggggggagtggttgaaggtcttttttttttttgttgttgttgttgttggtttctccccccannnnnnnnnnnnnnnnnnnnnnnnnnnnnnnnnnnnnnnnnnnnnnnnnnnnnnnnnnnnnnnnnnnnnnnnnnnnnnnnnnnnnnnnnnnnnnnnnnnnnnnnnnnnnnnnnnnnnnnnnnnnnnnnnnnnnnnnnnnnnnnnnnnnnnnnnnnnnnnnnnnnnnnnnnnnnnnnnnnnnnnnnnnnnnnnnnnnnnnnnnnnnnnnnnnnnnnnnnnnnnnnnnnnnnnnnnnnnnnnnnnnnnnnnnnnnnnnnnnnnnnnnnnnnnnnnnnnnnnnnnnnnnnnnnnnnnnnnnnnnnnnnnnnnnnnnnnnnnnnnnnnnnnnnnnnnnnnnnnnnnnnnnnnnnnnnnnnnnnnnnnnnnnnnnnnnnnnnnnnnnnnnnnnnnnnnnnnnnnnnnnnnnnnnnnnnnnnnnnnnnnnnnnnnnnnnnnnnnnnnnnnnnnnnnnnnnnnnnnnnnnnnnnnntgagttcgagcccagcctggtctacaaagtgagttccaggtacagccagggctatacagagaaaccctatcttgaaaaacaaaaaacaaacaaaaaagcaaaaacaaacgagagaaacaaccccgctccccccccaccccccgttccccccaaacaacaacttaggctttcagtttagaaaaattaagttctgggtaggtgagatggttgctgccaccatgcctgacccaaattttctggatggatcgccccgcccccacccagagccattacatagaaacactcccttcaacactccctccagtaaattaaaaactaaacaccaagttctgttactttgtcacagtgctccggcatattggattttgtcttttaaaaaaaaaaaaatatgtacaattggagacggaatttaatttgtaacactgaataagctttacctgtaaaattgttttgttattttttgagacatgctttcactatggagagcaagttggcctcagattacagagatcttcctgactctgcctcctgagtgctgggatcaaagacatagcaaccacgcccaactgaaaacgagctttgacattaaaaaagaaaagtccgtcagaacttatgagcacataaaggtcttgccccactacagtaggcctctggatattttctttctgttccttgccattcatttctctctccagttctagtccagaccaaacctagtcttttagctgcgtgaccttgcgcaagcatctttccccgggaagcctcggcgtattctcggtaaaacgagaaagttggcctctgatctttgcacacgctcccaactgtgaagcgggctgcagagtttacggagccgactccctctcccgggactcgatggtacggcccccggtctcccccacccctccgcgccggactttggtacaggcccagggggcccgcggtggcttctctaagctgcccttgccccccgccgagttccgggcccgaccccgcgcatgccgattggttagagtgagacccgggctgtgcggctataggtgatcccgggggtgggcggggcttcgaggccggcccctcccccgggtcggacgccgtaaggagccgcgggcgggcgggcggacagactgacgggagggccgggcggcgagcaagatggcgcagactcagggcaccaagaggaaagtctgttactactacgacggtgagctgcgggtgggcggcgcgggccgggcgttggggaaaggctgggggaggaggctgggaggaggctgaagccccggggagcctgagggaaagtcgaggctgaaggaggaggttggagagaggaagtcgaggctgaggccggagatgaggtgggggtcgtggaaggggtagtctgcggtaatcccggtggcggagattctcggggaatccgacctgaagttggagtgggattcctggagggaagcctaagcctggcggcggggatcggaatatgatggagacggtttgcctggatatcttcccctgctgagaatacaaaggtttttcactgtccccattctctctctctctttttctttctttcttttggtgagttctgcaggactggccactcatcccctcccccactccatcccccaagtctatgagtagggcctgcagttgctagttgggaaatggggctccccggggatgcaaggagagaggtgcatgaaacttgttaagacgacttttcattgagccagcgcgagcatcttactctgtcctgggttgtgtttctgttggggctggagggctcatcgaggcacatttcctgtgttgagttcccgtctgaagggggagctagacaatgtcacaggtatctttcggagttagcgctgggacaagggaatgtggggtggaggagaacacagcaggagcctcagcccaacctgagaggagcaggttgtgtgtcagtgcttaggacccaagaactggagttacaagccaggccctggcaagtggagccaacagcagggggaggggacagcacctttatctgagaaagggtctcacagtgtaactcacgctggtcttggattaagccccttcttcttactcttgactccaggcttacaccacttggtccagcatttgtgttttgggaatagcagttgagttgttcaggggacatctagccagccagccagtaggcggttggctgtttagatctgaaatttagaagacagatattttttggtaattgtcggtataaaataattcagatagtaattttagctggattagaaaagggtgttataactccagttgtagagggtgaaaagctatgttgatactttttttttttttttgaaatggcctctgtgtaaccctggctagcctggaactcactttgtagaccaggtttgcttcctactggaagagatttatcctacgcccctcccgagtgctaggattaaaggcatgtgccacaaccctggcctgttttaattctgaagaagtggactaagaaggttcagtggtcctgattgctctttcactatgctgtctttcaactgttagccacattcctgtttcagtctttcccagtgctgtggggtgacggagccaccaagcctggtgtcttcttgtttctgttctgttttgtttttaaggcagggtctgtctctaacagtcctagctgtcctggaagttgctttgtagaccaactaggctggcctctgaactcagagagatccccctgcctctgccttctgagtgctggtattaaaggggtgcaccactgtctagcagcctcattttttgtttcggttctttttgtttgtttggtttggtttggtttggttttggttttttgagacagtttctctgcgtagccctggctgtcctggaacttactctctagaccaggctggcctcaaacttagaaatccgtctgcctctggccaccaagtgctgggaattttttttcttcttgttttttgtagataatacatttcttggagaaaagtctccttatctccacttcctaaaagattgggtagtataataggcataatttttttaaagaattatttattttacgtatgtgagcacactgtagatgtctttagacacaccagatctcattacagatggttgtgagccaccatgtggttgctgggaaacgaacccaggacctctggaagatcagtatgtgctcccaactgctgagccatctctccagccccataattttttttgagattataatagaattacataatttcccctccttttctctctttttttcttcaagacaggatttctctgtatagccctggctgtcctgaaactggtgctgtagaccactagattgttcttggactcacagagatcctcctttctcttgcctctcaggtgctgggattaaaggccggccctaatacttccttgcagaggttttccttgctttgttaactggagaaagcagggccctgagagatggctcagtagttggtagtgtgtacagcccttgcagaggacaaagctcagttcctagcatccaccttgggaggctcacagatgcctgtgactccagctacagggacccagcgccctcttctggcttccacaccgccctgcactcacgggtacatccataccacacaccagtttagagcatttcctactgagatgctgcgctcaattcccagggccccccacagccacttgtaactccagttggaaggaatccggtgatctcttcgcgcttcaagtgctagatgggaatgtggtgcttggacatacatgcaggcaaaacttcacacacacaaaagactgtcctagaactggtctattagacgaggcagctgtgaactcaaggagatctgccacctagttttcctgctgggactaaagcctgcactaatggggaagtgctgggagggattggggcggaagctagattggagagaagaggatactttagcttgcaattttttgattgattggttttttgagacagggtttctctgtgtagccctggctgtcctggaactcactctgtagaccaggctggcctccagctcagaaattcacctgcttctgcctcccaagtgctggggctaaaggtgtgggccaccactgcccagctagtttgcaattttatttttgagacagggtctctctctgtgtattctgcttggcctggaactaaatgagacccatccgcctctgcctccagagcgcttacactaaaggtgtgtaccactacacccttctaagagaggaagtattgtttttttgtttttttgtttnnnnnnnnnnnnnnnnnnnnnnnnnnnnnnnnnnnnnnnnnnnnnnnnnnnnnnnnnnnnnnnnnnnnnnnnnnnnnnnnnnnnnnnnnnnnnnnnnnnnnnnnnnnnnnnnnnnnnnnnnnnnnnnnnnnnnnnnnnnnnnnnnnnnnnnnnnnnnnnnnnnnnnnnnnnnnnnnnnnnnnnnnnnnnnnnnnnnnnnnnnnnnnnnnnnnnnnnnnnnnnnnnnnnnnnnnnnnnnnnnnnnnnnnnnnnnnnnnnnnnnnnnnnnnnnnnnnnnnnnnnnnnnnnnnnnnnnnnnnnnnnnnnnnnnnnnnnnnnnnnnnnnnnnnnnnnnnnnnnnnnnnnnnnnnnnnnnnnnnnnnnnnnnnnnnnnnnnnnnnnnnnnnnnnnnnnnnnnnnnnnnnnnnnnnnnnnnnnnnnnnnnnnnnnnnnnnnnnnnnnnnnnnnnnnnnnnnnnnnnnnnnnnnnnttcagtctcttttccggttgggactcacttcactcttactgtcaggtttgctgtagtaggcaagccactttaccttttgtaagtcacttttccctcccctcgcctcccttcctctctctctttctcgctctctcgcttcttctctccctcccccctcctttccttccttttctttctttcctctgtgacagggtttctctgtgtagtcctggaatttgtcctgtagaccaggctggtctctaacccacagaggtcctcctatctctgcgtcgcaagcactggcatcaagagctgtgtgccaccattgcctggctttccagaaaacagagagaacggtttctactgagagcagcagtgagaaagaaca

SEQ ID NO: 230 - DNA, 2100 bp, Mus musculus
gaattccggattcaagctcctgactgcggccaatgggggcctctgagctgacgatctcgggtacgtttttgtaacttccagaacagggctctaggatgtctgatgttggggcgagtggcttaggggcagctccttcaggcctctctacattccttcagggatcatgggctgtgtctgcagctcaaaccctgaagatgactggatggagaacattgacgtgtgtgaaaactgccactatcccatagtcccactggacagcaagatctcgctgcccatccggaatggctctgaagtgcgggacccactggtcacctatgagggatctctcccaccagcatccccgctgcaagacaacctggttatcgccctgcacagttatgagccctcccatgatggagacttgggctttgagaagggtgaacagctccgaatcctggagcagagcggtgagtggtggaaggctcagtccctgacgactggccaagaaggcttcattcccttcaacttcgtggcgaaagcaaacagcctggagcctgaaccttggttcttcaagaatctgagccgtaaggacgccgagcggcagcttttggcgcccgggaacacgcatggatccttcctgatccgggaaagcgaaagcactgcggggtccttttccctgtcggtcagagacttcgaccagaaccagggagaagtggtgaaacattacaagatccgtaacctagacaacggtggcttctacatctcccctcgtatcacttttcccggattgcacgatctagtccgccattacaccaacgcctctgatgggctgtgcacaaagttgagccgtccttgccagacccagaagccccagaaaccatggtgggaggacgaatgggaagttcccagggaaacactgaagttggtggagcggctgggagctggccagttcggggaagtgtggatggggtactacaacggacacacgaaggtggcggtgaagagtctgaaacaagggagcatgtcccccgacgccttcctggctgaggctaacctcatgaagcagctgcagcacccgcggctagtccggctttatgcagtggtcacccaggaacccatctacatcatcacggaatacatggagaacgggagcctagtagattttctcaagactccctcgggcatcaagttgaatgtcaacaaacttttggacatggcagcccagattgcagagggcatggcgttcatcgaagaacagaattacatccatcgggacctgcgcgccgccaacatcctggtgtctgacacgctgagctgcaagattgcagactttggcctggcgcgcctcattgaggacaatgagtacacggcccgggagggggccaaatttcccattaagtggacagcaccagaagccattaactatgggaccttcaccatcaagtcagacgtgtggtccttcgggatcttgcttacagagattgtcacccacggtcgaatcccttacccaggaatgaccaaccctgaagtcattcagaacctggagagaggctaccgcatggtgagacctgacaactgtccggaagagctgtaccacctcatgatgctgtgctggaaggagcgcccagaggaccggcccacgtttgactaccttcggagtgttctggatgacttcttcacagccacagagggccagtaccagccccagccttgataggcctttcggtcccaagatcctcccaaccactgtccctggctagggcagatggaattcctgtgccatatctgtgtggcctgtgcacacatggactctgactctgtacatgaaacctgtgcgtgtgtcacacataatgcagtttctgtctgtacacacatctgtagttatgtgggttctacacatgtgtcttatacctgtggagcacgtgagtctaagccttggatacctcctaagatgtctcttcctataccgttccatttcctgaagccatagagaggagacggtctgcgattgatgcgtgtctctgtctaccactgcctttcagagggtctccaggaaggccctccttgtgggctgccatccaatctcatgtctctgtgtgttctgtcctgtgcccggaattc

SEQ ID NO: 231 - DNA, 1530 bp, Mus musculus
atgggctgtgtctgcagctcaaaccctgaagatgactggatggagaacattgacgtgtgtgaaaactgccactatcccatagtcccactggacagcaagatctcgctgcccatccggaatggctctgaagtgcgggacccactggtcacctatgagggatctctcccaccagcatccccgctgcaagacaacctggttatcgccctgcacagttatgagccctcccatgatggagacttgggctttgagaagggtgaacagctccgaatcctggagcagagcggtgagtggtggaaggctcagtccctgacgactggccaagaaggcttcattcccttcaacttcgtggcgaaagcaaacagcctggagcctgaaccttggttcttcaagaatctgagccgtaaggacgccgagcggcagcttttggcgcccgggaacacgcatggatccttcctgatccgggaaagcgaaagcactgcggggtccttttccctgtcggtcagagacttcgaccagaaccagggagaagtggtgaaacattacaagatccgtaacctagacaacggtggcttctacatctcccctcgtatcacttttcccggattgcacgatctagtccgccattacaccaacgcctctgatgggctgtgcacaaagttgagccgtccttgccagacccagaagccccagaaaccatggtgggaggacgaatgggaagttcccagggaaacactgaagttggtggagcggctgggagctggccagttcggggaagtgtggatggggtactacaacggacacacgaaggtggcggtgaagagtctgaaacaagggagcatgtcccccgacgccttcctggctgaggctaacctcatgaagcagctgcagcacccgcggctagtccggctttatgcagtggtcacccaggaacccatctacatcatcacggaatacatggagaacgggagcctagtagattttctcaagactccctcgggcatcaagttgaatgtcaacaaacttttggacatggcagcccagattgcagagggcatggcgttcatcgaagaacagaattacatccatcgggacctgcgcgccgccaacatcctggtgtctgacacgctgagctgcaagattgcagactttggcctggcgcgcctcattgaggacaatgagtacacggcccgggagggggccaaatttcccattaagtggacagcaccagaagccattaactatgggaccttcaccatcaagtcagacgtgtggtccttcgggatcttgcttacagagattgtcacccacggtcgaatcccttacccaggaatgaccaaccctgaagtcattcagaacctggagagaggctaccgcatggtgagacctgacaactgtccggaagagctgtaccacctcatgatgctgtgctggaaggagcgcccagaggaccggcccacgtttgactaccttcggagtgttctggatgacttcttcacagccacagagggccagtaccagccccagccttga

SEQ ID NO: 232 - DNA, 31842 bp, Homo sapiens
  misc_feature (1)..(2500): "n" at positions 1 through 2500 can be any base.
  misc_feature (28552)..(30747): "n" at positions 28552 through 30747 can be any base.
nnnnnnnnnnnnnnnnnnnnnnnnnnnnnnnnnnnnnnnnnnnnnnnnnnnnnnnnnnnnnnnnnnnnnnnnnnnnnnnnnnnnnnnnnnnnnnnnnnnnnnnnnnnnnnnnnnnnnnnnnnnnnnnnnnnnnnnnnnnnnnnnnnnnnnnnnnnnnnnnnnnnnnnnnnnnnnnnnnnnnnnnnnnnnnnnnnnnnnnnnnnnnnnnnnnnnnnnnnnnnnnnnnnnnnnnnnnnnnnnnnnnnnnnnnnnnnnnnnnnnnnnnnnnnnnnnnnnnnnnnnnnnnnnnnnnnnnnnnnnnnnnnnnnnnnnnnnnnnnnnnnnnnnnnnnnnnnnnnnnnnnnnnnnnnnnnnnnnnnnnnnnnnnnnnnnnnnnnnnnnnnnnnnnnnnnnnnnnnnnnnnnnnnnnnnnnnnnnnnnnnnnnnnnnnnnnnnnnnnnnnnnnnnnnnnnnnnnnnnnnnnnnnnnnnnnnnnnnnnnnnnnnnnnnnnnnnnnnnnnnnnnnnnnnnnnnnnnnnnnnnnnnnnnnnnnnnnnnnnnnnnnnnnnnnnnnnnnnnnnnnnnnnnnnnnnnnnnnnnnnnnnnnnnnnnnnnnnnnnnnnnnnnnnnnnnnnnnnnnnnnnnnnnnnnnnnnnnnnnnnnnnnnnnnnnnnnnnnnnnnnnnnnnnnnnnnnnnnnnnnnnnnnnnnnnnnnnnnnnnnnnnnnnnnnnnnnnnnnnnnnnnnnnnnnnnnnnnnnnnnnnnnnnnnnnnnnnnnnnnnnnnnnnnnnnnnnnnnnnnnnnnnnnnnnnnnnnnnnnnnnnnnnnnnnnnnnnnnnnnnnnnnnnnnnnnnnnnnnnnnnnnnnnnnnnnnnnnnnnnnnnnnnnnnnnnnnnnnnnnnnnnnnnnnnnnnnnnnnnnnnnnnnnnnnnnnnnnnnnnnnnnnnnnnnnnnnnnnnnnnnnnnnnnnnnnnnnnnnnnnnnnnnnnnnnnnnnnnnnnnnnnnnnnnnnnnnnnnnnnnnnnnnnnnnnnnnnnnnnnnnnnnnnnnnnnnnnnnnnnnnnnnnnnnnnnnnnnnnnnnnnnnnnnnnnnnnnnnnnnnnnnnnnnnnnnnnnnnnnnnnnnnnnnnnnnnnnnnnnnnnnnnnnnnnnnnnnnnnnnnnnnnnnnnnnnnnnnnnnnnnnnnnnnnnnnnnnnnnnnnnnnnnnnnnnnnnnnnnnnnnnnnnnnnnnnnnnnnnnnnnnnnnnnnnnnnnnnnnnnnnnnnnnnnnnnnnnnnnnnnnnnnnnnnnnnnnnnnnnnnnnnnnnnnnnnnnnnnnnnnnnnnnnnnnnnnnnnnnnnnnnnnnnnnnnnnnnnnnnnnnnnnnnnnnnnnnnnnnnnnnnnnnnnnnnnnnnnnnnnnnnnnnnnnnnnnnnnnnnnnnnnnnnnnnnnnnnnnnnnnnnnnnnnnnnnnnnnnnnnnnnnnnnnnnnnnnnnnnnnnnnnnnnnnnnnnnnnnnnnnnnnnnnnnnnnnnnnnnnnnnnnnnnnnnnnnnnnnnnnnnnnnnnnnnnnnnnnnnnnnnnnnnnnnnnnnnnnnnnnnnnnnnnnnnnnnnnnnnnnnnnnnnnnnnnnnnnnnnnnnnnnnnnnnnnnnnnnnnnnnnnnnnnnnnnnnnnnnnnnnnnnnnnnnnnnnnnnnnnnnnnnnnnnnnnnnnnnnnnnnnnnnnnnnnnnnnnnnnnnnnnnnnnnnnnnnnnnnnnnnnnnnnnnnnnnnnnnnnnnnnnnnnnnnnnnnnnnnnnnnnnnnnnnnnnnnnnnnnnnnnnnnnnnnnnnnnnnnnnnnnnnnnnnnnnnnnnnnnnnnnnnnnnnnnnnnnnnnnnnnnnnnnnnnnnnnnnnnnnnnnnnnnnnnnnnnnnnnnnnnnnnnnnnnnnnnnnnnnnnnnnnnnnnnnnnnnnnnnnnnnnnnnnnnnnnnnnnnnnnnnnnnnnnnnnnnnnnnnnnnnnnnnnnnnnnnnnnnnnnnnnnnnnnnnnnnnnnnnnnnnnnnnnnnnnnnnnnnnnnnnnnnnnnnnnnnnnnnnnnnnnnnnnnnnnnnnnnnnnnnnnnnnnnnnnnnnnnnnnnnnnnnnnnnnnnnnnnnnnnnnnnnnnnnnnnnnnnnnnnnnnnnnnnnnnnnnnnnnnnnnnnnnnnnnnnnnnnnnnnnnnnnnnnnnnnnnnnnnnnnnnnnnnnnnnnnnnnnnnnnnnnnnnnnnnnnnnnnnnnnnnnnnnnnnnnnnnnnnnnnnnnnnnnnnnnnnnnnnnnnnnnnnnnnnnnnnnnnnnnnnnnnnnnnnnnnnnnnnnnnnnnnnnnnnnnnnnnnnnnnnnnnnnnnnnnnnnnnnnnnnnnnnnnnnnnnnnnnnnnnnnnnnnnnnnnnnnnnnnnnnnnnnnnnnnnnnnnnnnnnnnnnnnnnnnnnnnnnnnnnnnnnnnnnnnnnnnnnnnnnnnnnnnnnnnnnnnnnnnnnnnnnnnnnnnnnnnnnnnnnnnnnnnnnnnnnnnnnnnntccttcttcttctttcccatctctcccttcctcctatacattccctcttcttaacctcaaacttctacaatctttctcttgcctttttctaaaggctccaagaatgtcaagcctggcagggaccttactggtctaagtccacattccatctgatgttggtattctctttacaacacaaccaacttgtggtttcctaaggctcatacgactatcacaaacaacaggatgctcactacctcacaaaacagctcagcttatctgagaccagttccaggttgctgttagtcctttactgggggctcttgttgctaattactctcaggctataatagtcaaaaagtcatttgcagtcacagatgggtgcactctggtctagcaggatttcccaaatgtccacctccccccaggactcctaacagtaggggaaagagtgaatacgtacccttttcctggaaagtttcttgatttgatttaaaattccatgcacattttgcattttcctccataataggtcatgtttgtttaacttacatgaataaggtcaggaaacactcatgctctggaaaaatgcacaccatgacatgacttccggtacccatgggaggctgagtatctcagtttaagaaacaggagtcgagctgggcacggtggctcacgtctgtagtcccagcactttgggaggtcgaggagggcagatcacctgaagtcaggagttcaagaccagccagaccaacatggtgaaaccctgtctctactaaaaatacaaaattaggccgggcatggtggctcatgcctgtaatcccagcactttgagaggccgaggcgggcagatcacctgaggtcgagagattgagaccagcctgaccaacatggagaaatccagtctcttaaaaaatacagaattagccgggtgtggtggcacacgcctgtaatcccagttacttgggaggctgaggcaggagaatcacttgaacctgggaggtggatattgcagtgagccgagatcacaccattgcactccagcctgggcaacaagagcgaaactctgtctcaaaaaataataataataaggccgggcacagtggctcacgcctgtaatcccagcactttgggaggccgaggcaggaggatcacaaggtgaggagattgagaccatcctggcaaacacgatgaaaccccatctctactaaaaatataaaaaatcagccaggtgtggcggcacgcgcctgtagtcccagctactagggaggctgaggcaggagaatcgcttgaacccaggaggcggaggttgcagtgagctgagatcgcgccactgcactccagcctgggagacagagtgagactctgtctcaaaaaaaataaaaaagaaaaaagtaatgagagaaatgcaaatgcagaaagagaaatgcaaatgcctggcagtatgttgggcttcttttcaaaacttaaaaaaatttattattattattcatttatttatttactttagacaaggggtcttgttctgtcacccaggctggagtgcagtggtgcaatcgtagctcactgtggccttgaactcctgggctcaagtgatcctcctgcctcagcctcccaagcacctgggattataggcatgcaccaccatgcccagctagtttttataataataataataataagaggcttgcttgaggtgatggatagctcatttatcccttttgtgattattacacattgtatgcctctatcaaaatatatcatgtaccccataaacatatatacttaccagatacccataaaagtaaataaataaataagtaaataaataaatatacaaaattagccgggcgtggtggcacatgcctgtaatcccagctacttgggagactgaggtaggagaatcgcttgaacctgggaggcagaggttgcggtgggccgagatcgtgccattgcactccagcttgggcaacaagagcaaaactccgtctcaaaaaaaaaaaaaaaagaaaagaaaagaaacaggagtctagggctgggcacagtggctcattgcctgtaatcccagcactttgggaggctgaggtcaggagttcgagaccagcctggccaacgtggcaaaactctgtctctactaaaaatacaaaacacaaaatacaaaaattagccaggcgtggtggtgcacgcctgtagtcccacctgcttagggaggctgagggaggagagacagagcttgcagtgagcccagatcacaccactgcactccagcctgggcaacagagcaagtctaaaaaaaaaaaaaaaaggaaagagagaaaagaaacaggagtctaggctgggcatggtggttcacgcctgtaatcccagcactttgggaggctgaggtgggtggatcacttgaggtcaggagttcaagaccaccctggccaacatggtgaaacccccatctctactaaaattacaaaaattagctgggcgtggtgacacatgcctgtagtcctagctagtcagggggctgaggcaggagaatcacttgaacctgggaggtggaggttccagtgagccaagttcacaccactgaactccagcctaggtgacagagtgagattctgtctgtttttttttcttttgagatggtatcttgctctgtcacctaggctagagtgcaatggcgtggtctcagctcactgcaacctccacctccatggttcaagcaattctcctgcctcagcctcccaagaagctgggattacaggcgcgcaccaccacgcccagctaatttttgtatttttagtagagacagggtttcaccatgttggccaggcttgtctcgaactcctgaccatgtgatttgccctcctcagcctcccaaagtgctgggattacaggcatgagccaccgcgcccagccgagactctattaaaaaaagaaaaaagaaagaaacaggagtctaaagcaaaggagattaattacccagtcccattcttccaccttccaaagcaggagttggtaggacagaattgtgcactggtgaaagtgtttctaagcactaaactaagctaacattcatgtgagcttatgagaaatggatgaagagccccatttgacagaagaggaaaagtgaggcttaggaggaatgatttcagcaaagtcacacagtaagtgtcaaaattgctatttgaacttaggtctctaactatggggacagtcttctgagttttgctaatgagaaacttccactgctccctgcttccacttagacccagcatgaattctctctctctgtctctcttttgttttttctttttagacagagtctctgtcacccaagttggagtgaacagtgcggtggcagtggcaggatctaggctcactgcaacctccacctcttgagttcaagcaattctccagccaccatgcccagctaactttttttttttttttttttttgtatttttagtagagacagggtttcaccattgttggccaggctggttgtcttgaacttctgaccccaggtgatccacccaccttggcctcccaaagtgctgggattacaagcatgagccaccgtgcccagcctgctcttttgagatggagtctcgctctgtcatccaggctggagtgcagtggcttgatctcggctcactgcaacctctgcctcccgggttcaagtgattctcctgcctcagcctcctgagtagctgggattacaggcgtgtgccaccatgcctggctaatttttgtatttttagtagacacggggtttcaccatgttggtcaggctggtcttgaacacctgacctcgtgatccacccgcctcagcctcccaaagtgctgggattacaggaatgagccatcgtgcccggacttttttttttttttttttttttttttgagacggacggaatctcactctgttgccaggctggagtgcaatggcgcaattccggctcactgcaacctctacctcctgggtttaagcgattctcctgcctcagcctcctgagtagctgagattacaggcacctgccaccaagcccgattaatttttggatttttagtagaggcagggttgcaccatgttggccaggatggtctcgatcccttaatcttgtgacccacccgccttggcctcccaaagtgctgggattacaggtgtgagccaccgcgcctggcctttttttttttttttttgagacaggctctcgctctgttatccaggctggagtgcagtggcacaatcgtagctcattgcagccttgagctcctgggctcaagtgatctttttgcctcagcctcccaagtagctggaactacaggcatgccccatcacacctggctaattttttgattttttttctagagatgaggtctcactatgttgcccaggctagtctggaacttctgagtttgaatggtcttactgcctcagtctcccaaagtgccgcgattacagatgtgagccaccacgcccggccagcaactccagctttgctctactccaaataggttgtgtgactttaagcatacctctgtgggcctcagtttgctcatctaaaatcagaggtttagccaggtatggcagctcatgcctgtaatcccagcactttgggaggccaagaaggaaggatcacttgaagccaagaatttgagaccagtccgggcaacatagcaatacccccatctctagaacaaataaaaaatcacctgggctcagtggtgccagctacccaggaggctgaagttagaggatcacttgagcccaggagtttgaggttccagtgagttaggattgggtcattgcactgcagtctgggcaagagagtgacactttatctcaaaaataaatcaacaaataataaaattggagattaggcttgctggtttctaagacctttgcagatgggagactctatgcattaacactgcatgttccagttgacatttattaactaattttgggtgctggtggctttcagacaaataaactacagcttctgctcttgatgaacccccactctcatcaaaggtatgggagaggcagtgggaccctggggctgacatgtaaatcagtaatcatggaactctgtgtctaagttgattattgaggtctgaatagaatgttgcaggagactggggtgagagggaagcaaagagcattgggaagtcttcagactaggtgatatttaggccaggtgcctgtaatccgagcactttgggaggctgaggcaggagaattgcttgaggccaggagttcgagaccagcctggccaacatggtgaaaccctgtctctactaaaaatacaaaagttagccaagcgtgatggtgcatgcctgtaatcccaactactcaggaggccgaggcaggagaattgcttgaacctgggaggtagaggttgcaggaaaaaaaaaaaggtaatatttcagctgagccttgaaggttgagttagaattcagcagttggacaaaagagagcatgccgactgggttcggtggtgcatgcctataatcctagcatttggggaggccaaggcaggaggattgcttgagcccaggagttcgagatcagactgggcaacatagtgagacctcatctctacaaaaaaataatcagctgggcatgatggtgtgcacctttagtctcagctactggggaggttgaggtgggaagattgcttgagcccaggaggtctaaggggattgcgccactgcacttcagcctgggagaggaagggagaccctgtctcaagagagagagagaaagagagagagagagagaaagagagagagagagagaaagagagagagagagagaaagagagagagagagagagagagagagcgagagagcgcacgcatttcaaagcagggagaaccacaagtacaaaggcattaagtaagaaaatagcatggggtgtttgggaaaggcaagaatagttcagaacacaggctgtgtgtgtgggggtgtgtgggggtgcctgtgtgtgggtgtttgtgtgtgtgtgagtgtgggtgtgtgggggtatctatggaggggatgcctgtgtgtgtgtgtaaggtgagtgtgtggatgtgtgcatgggtgtgggtgagtgtgtggaggtgcctgtgtgtgtgtatgaatgtgtgttggggaggggagaatgtgtgtgtgtggggtgagtgcgtgtgtgtgggggtgaatgcgtgtgtgtgtgtatgtgggtgtgactgtgtgggtgtgtggacgagtgtgtgtgttcctgggtgtgggagcctgtgtgtgtagggggagtatgtatagggtgtgtgcatgaatgtgtgtgtgggtacgtgtgtgagagtgggtgcctgtgtgtggggggtgagtgtgtgtggtgggggggcacttgtggagggtgagtgtatgtgtttactgagtgtgagtgtgggtgcctgtgtgtgggagggtgagtctgtgtgtgagtgtgtgggggagtacctgtgaggggtgagtgtgtgtgtttatgtgaaagtgtgtgtgtgtggatgcctctgtggaggtgggatagggggtgcctctgtgtgtgtgtgtgagagtgtgtgtgtgtagggtgtgtatatgtatagggtgtgtgtgagtgtgtgtgtgtgagagagtgtgtgtgtggcagaatagactgcggaggtggatttcatcttgatatgaaaggtctggaatgcatggtacattaaactttgaggacagcgctttccaagcactctgaggagcagccctagagaaggaggagctgcagggactccgggggcttcaaagtgagggccccactctgcttcaggcaaaacaggcacacatttatcactttatctatggagttctgcttgatttcatcagacaaaaaatttccactgctaaaacaggcaaataaacaaaaaaaaagttatggccaacagagtcactggagggttttctgctggggagaagcaagcccgtgtttgaaggaaccctgtgagatgactgtgggctgtgtgaggggaacagcgggggcttgatggtggacttcgggagcagaagcctctttctcagcctcctcagctagacaggggaattataataggaggtgtggcgtgcacacctctccagtaggggagggtctgataagtcaggtctctcccaggcttgggaaagtgtgtgtcatctctaggaggtggtcctcccaacacagggtactggcagagggagagggagggggcagaggcaggaagtgggtaactagactaacaaaggtgcctgtggcggtttgcccatcccaggtgggagggtggggctagggctcaggggccgtgtgtgaatttacttgtagcctgagggctcagagggagcaccggtttggagctgggaccccctattttagcttttctgtggctggtgaatggggatcccaggatctcacaatctcaggtacttttggaactttccagggcaaggccccattatatctgatgttgggggagcagatcttgggggagccccttcagccccctcttccattccctcagggaccatgggctgtggctgcagctcacacccggaagatgactggatggaaaacatcgatgtgtgtgagaactgccattatcccatagtcccactggatggcaagggcacggtaagaggcgagacaggggccttggtgagggagttgggtagagaatgcaacccaggagaaagaaatgaccagcactacaggcccttgaaagaatagagtggccctctcccctgaaatacagaaaggaaaagaggcccagagaggggaagggaatctcctaagatcacacagaaagtagttggtaaactcagggataacatctaaccaggctggagaggctgagagcagagcaggggggaagggggccagggtctgacccaatcttctgctttctgaccccaccctcatcccccactccacagctgctcatccgaaatggctctgaggtgcgggacccactggttacctacgaaggctccaatccgccggcttccccactgcaaggtgaccccaggcagcagggcctgaaagacaaggcctgcggatccctggctgttggcttccacctctcccccacctactttctccccggtcttgccttccttgtcccccaccctgtaactccaggcttcctgccgatcccagctcggttctccctgatgccccttgtctttacagacaacctggttatcgctctgcacagctatgagccctctcacgacggagatctgggctttgagaagggggaacagctccgcatcctggagcagtgagtccctctccaccttgctctggcggagtccgtgagggagcggcgatctccgcgacccgcagccctcctgcggcccttgaccagctcggggtggccgcccttgggacaaaattcgaggctcagtattgctgagccagggttgggggaggctggcttaaggggtggaggggtctttgagggagggtctcaggtcgacggctgagcgagccacactgacccacctccgtggcgcaggagcggcgagtggtggaaggcgcagtccctgaccacgggccaggaaggcttcatccccttcaattttgtggccaaagcgaacagcctggagcccgaaccgtaagtggggacccgtcgtgggggtgggtaggagcagatctagggatcctggagcagggagtaggcctggggtggcggtgaaggcttgagggccacggaggaagatccgacgacagccgacggccttcgttcgcttccgccctgcacagctggttcttcaagaacctgagccgcaaggacgcggagcggcagctcctggcgcccgggaacactcacggctccttcctcatccgggagagcgagagcaccgcgggtgagcgggcggcggtctcgaccgggcgcgggggtgccccggggtgtgcccgagggggggcgcagggtgagcccgaggtggagacacggggtgagtcggagggggacgcgggatgagcccgaggtgggggcgcgggatgacccggagttgggggtgctgggtgagcccaaggtgggggcgcggtggcgggccagactcactgcgttctttcgtcgctttgtccatccattcattcattcaggatcgttttcactgtcggtccgggacttcgaccagaaccagggagaggtggtgaaacattacaagatccgtaatctggacaacggtggcttctacatctcccctcgaatcacttttcccggcctgcatgaactggtccgccattacaccagtgagcccgacgggacccctcccccgtgccctatcagcctatctcccctcagtccccctcaggtgtcccccatccatctttcaatgccctactccattccccgcagtgggtgaggtgtggaacctgaccctacggccccaagtgtttgggtgacagccccacacccccttgctagtccacttcacctagatgggggcttggagaagtgggggaggtggtgtcaatacgaggcctgccctattgacagccttcacccctccctcgtcctcgcagatgcttcagatgggctgtgcacacggttgagccgcccctgccagacccagaagccccagaagccgtggtgggaggacgagtgggaggttcccagggagacgctgaagctggtggagcggctgggggctggacagttcggggaggtgtggatgggtgagtgtggcctccaggactgcctgggaagaggggaacgggaggggccgctgaggtgatgagagtcccaggacagctgcctggcgactttcccactccttcccttccccgacccagggtactacaacgggcacacgaaggtggcggtgaagagcctgaagcagggcagcatgtccccggacgccttcctggccgaggccaacctcatgaagcagctgcaacaccagcggctggttcggctctacgctgtggtcacccaggagcccatctacatcatcactgaatacatggagaatggtgggtgctacccgagtcggctaccaggggatactgctctccctgctgtccctgccagagggtggaaatacaccttttcttctggcccaaagctcaagcaaggagggtttcttgagctttcctgccccctggagactcacctccagccgggcgcggtggctcaggcctgtaatcccagcactttgggagccgaggcgggcagatcacgaggtcaggagttcgagaccagcctgaccaatatggtgaaactctgtctctactaaaaatacaaaaagtagccaggtgtggtggcacatgcctgtaatcccagctactcagaagactgaggcaggagaatccctttaatccgggaggtggaggctacagttgcagtgagctgagatcatgccactgaactccagcctgggtgacagagcaagactctatcaaaaaaaaaaaaaaaaaaaaaaagactcacctccaggcatgagaaaaaggtgtatcctctgatctgatcctgtctgggggcaagcctaaggtggcaagaatgttctggaagagcattcaccccaaccttccctgacctgccattctgtttgccttcttcaaagccctaccttgatctcaggatgcttgatctcagaaagcaagtgggtccctagccctgtttctctcccttctgcccctgagccctaggagggcagatctgcccccaaagccctctttttcagttctgagtgagacccccacccctgcacccctcttggtctgttactggacagagtgagagccccaggaagaggaatatgagtttctagcttcagctttgttcacaccgatttgccgtgtgacaggccaagtgcctgcactgtctctggtgctcagtttccccaagtataacagcagaaatctaaatgggctcaccagaaataatacagagtattcatcaaggcctctagagtctgactgcctgggtcagaagcctggcttcatgattttatggctttgtgataattatatcacctctttctgccatggtttcctactataataacgcgttagtaacttcctcacagggtcttgtgaggatgaaataattaatgcatacagagcagttagaactatgcctacttccaggtgctgtggctcaagcctataactccagcactttgggaggccaaggtgggtggatcacttgagcccagaagttcaagaccagtctgtgcaacatagcgagacttcattcctacaaaaaaatgtttaaaaattagctgggcatagtggtgtatgcctgtagtcccagctacttgggaggctgaggtgggaggatcacttgagcccaggaggttgaggctgcactgagctgtgattgcaccactgcactccaacctgggtaacagagcgagaccttgtctcaaaacaaaaaacccacaaaactatggctaccatatagtaactgatcaataagtttgttgctgttatctggctctgattctttgggaatgtaagatctatccttttttcaggaagagaaacaagctgttcattggctaatgggaaatggcaaatagattatgtcatgtgtatcttttttttttttgagtctcactctgtcctccaggctggagtgcagtggcatgatctcggctcacttcagcctccccctcctgggttcaaatgattctcatgcctcagtctcccaagtagctgggactacaagcatgtgccaccatgcctggctaatttttgtatttttagtagagacaggttttcgccttgttggctaggctggtctcgatctcctgtcctcaggtgatcctcccgccttggcctcccaaagtgctgggattacagatgtgagccaccatgcccagcctatcatgtgtatcgactttgattggtagttgcttgtagtgctggagaaggattctgaggttcattggaagtgagtgccaggaatgattagtaacatctgccatggatacaatggaagaatggcagtatatctatgtctatgtatttgctgtgtgtaggtgaggtctttgtctttggtaactagttcagcactcaaagtggggacactcaggttgctgtcatccttttacagggttttaatctcttgggaagggccattggtcactcactgcatcctagcaactcccatccatgtccagctgccctccactattagagaggtggtccctcagacccccagaccccctctttcttattccatccaatatattcagcacatagttattgtttcttactctcggctgggcaccaggaacatggatggatgaaacaaggttcctgttgtcagggaaacctgattttagttacagctactggggaaaccagagtttgtgccatgggaaagttccagcatgcccatgggagtgtagatgatgatccagtttattatgcctggtaggatctagagaggcttcctagtggggcagtctagcagggccacgaaagaaaagtagaattttttttagcaggcagagatgaaacaaagaggctttggggtgagagcctagtggtctgagtgcaggatctcaaaattgctaaactgtttgaagtcaaaggcagagtgggggaaagagaagaagctaccagtgtggaccatgccaagcttaggatactagttgaggattctaggttctaccttattggtgatgaaaaacctacagatccctcccagcatgctctaccctagcccctctgcaaaaaaacctttacatatcctgggcatccttaccctgaacacacactcctccattctcactcttcaatcttccttttcacatgtcagacacacttctagactcccagttggaggagaaaggtctgggggcctccccctggggcaacttgggccagcaactcttgcttctgcccacagggagtctagtggattttctcaagaccccttcaggcatcaagttgaccatcaacaaactcctggacatggcagcccaagtaaggagactggggaggggggctgggcaagggaacagaccagtgacgtgaagacatctggctcaggaccgctgatctgtgtttggcctgcagattgcagaaggcatggcattcattgaagagcggaattatattcatcgtgaccttcgggctgccaacattctggtgtctgacaccctgagctgcaagattgcagactttggcctagcacgcctcattgaggacaacgagtacacagccagggagggtacgtgtgagatttaagggtggtctgggccctgcagggtctggccaagcagacccaggtgacctcactctgcctcctccttaggggccaagtttcccattaagtggacagcgccagaagccattaactacgggacattcaccatcaagtcagatgtgtggtcttttgggatcctgctgacggaaattgtcacccacggccgcatcccttacccaggttagagccaagggcaggaactgaaagggtgatgggaagggcaagtccatgtcttcccattcaattctttccagtctcagaatctgaaactttgtagctgcatctcctctatcttctcaggggtatgagtccaacgtccccaggcagatgccacatctcccagggctggcttccatctccgtatctctctttaataaccccagctcttttctttttctctttttttctttttcttttttttttttttttttttttttttttttgagacggagtcttgctctgtctcccaggctggggtgcagtggcgccatcttggatcactgcaacctctgcctcctgggttcaagtgattctcctgcctcagcctcccaaatagctaggattacaggtacgtgccaccatgcgcagctaattttttgtatttttagtagagacagggtttcaccatgttagccaggatggcctcaatctcctgacctcgtgattggcctgcctcggcctcccagtgttgggattacaggcgtgagccaccacacccggccccagctcttttctttagttctggcccaggcagcctggtatggtagaagaagatctagctcaggaacaagaggcctaccttttatcagcagatctgccactgttgctaactttctgtttggctttgttcagatcattactgtaactagtgaagctagtcacttcacttctctaagcctcagtttcctgatactaaaaataagagactaggccaggtacagtggcttatgcctataatctcagaactttgggagaccaaggtgggaggactgcttgagcccaggagttcgagaccagcctgggaaactggtcgaaaccccatctctacaaaaacaaaagttagccaggtttggtggcatgtgcctctagtcccagctactcagaaggctgaggtgggaggatcacctgagccagggaggcagaggttgcagtgagccaagaccatgccataacactccagcctagggcaatagaccaagaccctgtctcaaaacaagaaaaagagagactccatctctacaaaaaaaaaaaaacaaacaaacaaaaaaaacatttaaaaattagctgggcatggtggcacacacccgtagtttcagctatttgggaggctgaggtgggaggatcatttgagcccaggaggttgagggtgcagtgagccatgattgttctattgcactccagcctgagcaacagagagagaatttgtctcaaaaaaaaaaaaaaagaaaaagaaaaagaaaaaagaaaaaatgagagaccatttgtgaaagagcctgactcatagtaggttgtcagtatacactgactcctcccaccatctcctggacaaagccctttacccctgaattcagccaagacagggatggaatttttgaaaggaacttgctaagaaactctggggaaaggaaatggagcataaagacaggagtaggggggtcatgcggcacagtggctagatttgtagaagcttcccatatccccagagcaaggtgaacagacctttgctccaaggaaggtaaagacaccttggaaggccggatgcagtggctcacacctgtaataccagcactttgggaggccgaggcgggtggatcacaaggtcaggtgttcgagaccagcctgaccaacatggtgaaaccccgtctctactaaaaaaaatatatataaaaattatctgggcatggtggcacgcgcctgtaaccctagatactcaggaggctgaggcaggagaattgcttgaacccaggaggcagaggttgcagtgagctgagatcatgccaccgcactccagcctgggtgacaaagtgagactctgtttcaaaacaaaaacaaaaacaaccaccttggaaacaggtgaaaagctgaggggcttccctgccctgggcttgccccaaaccagcgtccaggggtagtgctggagctggaaatacagaaatattctccagttatcctgccaggggtcctcactgctccttcccggttcccacagaggcaaacccatagggaatgtatctattagaagaaaataggcagtgaaagcatgatgataaatggcaactgacatatagcattagggtcagggagacaatggggagaaatggggaccttggtaaacttgcagctgctccagcagatggctgcaattaaggcgtgggggacccaaaaaaacagatcttttgtttttttaagagaagcccaaacttggagttttaggaaaatctgttcatttccatttattggcgattgattcaaattgtttaaaagcactctaggggctgggcacggtgactcacacctgtaatcccagcactttgggaagctgaggtgggtggatcacaaggtgaggagtttgagaccagcctggccaacatggtgaaaccctgcctctactaaaaatacaaaaatattagccaggcgtggtgttgggcactggtagtcccagccactcaagaggctggggcaagagaatcacttgaaccctggaggcggaagttgcagtgagccatgatcacgctgttgcactccagcctgggtgacagagtgagagtccatctcaaaaataaatataaataaattaaataaataaattaattaaatgaataaataaataaaaccactctagggccaatccaaagtggatctgtgggctatactcaggctggatttagcctgtgggcttgcacccttaactctggccatgggtgtttagttccgtggcctatgtcctcctatgccccagttttaaaatgtgagagtcccagccaggcgtggtgggtcacgcctgcaacccagcactttgggaggctgagatgagcggatcacgtggtcaggaggtggagaccagcctgaccaacatagtgaaaccccatctctactaaaaatacaaaaattaaccgggtgtggtggcatgcacctgtagtcccagctactcgggaagctgagacaggggaatcatttgaacctgggaggcggaggttgcagtgagccgagactgtaccattgcactccagcctgggcaacagagcgagactctgtctcaaaaaaaaaaaaaaaaaaaaaaaattgtgagagtcccataggcagaggctcccttgtacaagtcctggggaaaaagggtctctgttgaccaggctttagtcccaagctttccaggagcaaaactttgattttgtaaataccctataaggttttggtctttgggaactgcttgtcacaatctttgttcagaagactgaaggagaaaccagacactacatgagcaatttagaaatagggaaggagggagctatgttactgctgtgatcatgtagttctccagagcagctcttcttggggtctacatgccaaaagcctgccagaggggccaggaccagcataaagggagggaaccagcccaaagactatttcatctgggtcatggaggggcctggggaaccttctcaagtccaagcaaggtctgctttgctaggcccagggtccatttggcttcgtgatgcaggatgtcatgtgcctggtcttaaaactggagagacctcaccactgtcttggttgtgggtgcccatcctgccctgggccctgaccatctcatcattcctaccaaataataataatcccaggtgccctttattatttatttatttatgtatttatttcagacagagtctctgtcacccaggctggagtgcagtggcatgatctcagctcactgcaacctctacctcctgggtttaagcgattctcctgcctcagtctctcgggtagctggaattacaggtgtgtgccaccacgcccagctaatttttgtatttttttagtacagacaggtttttactatgttgaccaggctggtttcaaactcctgaccccaggtgatccacccggcttggcctcccaaagtgttgggattacaggcgtgagccaccgcagatggcctcaggtgccctttatgaagcatctccgatccagactttctgtgcctggatagatttgatgctttctgtgatatatatatatatatatatctgtgagatatatatatctgtgagatatatatatatctgtgagagatatatatatgtgagatatatatataataatatatatattatttttatttttaatttttttgagacaagagtctggcttgagttgctcaggctggagtgcagtggcacagtctcagctcactacaacctctgcacctccacctcccaggttcaagcaattactgtgactcagcctcccaaatagctgggactacaggcgcataccaccaagcctggctaatttttgtatttttagtaaagatggggttttgccatgttggtcaggctggtcttgaactcctggcctcaagtgatctgcctgctttggcctcccaccatgctgggattacaggcatgagccaccatgcctggcctgtgcactatatttgatgctttctgtgcacaatctcatttaatcctcataacaattctatgaggtaggaacagttatttactctattttccaaataaggaaactgggctcgcccaaggttccacaactaacatgtgtgtattattgagcatttaatttacaccagggaagcaggttgtggtggtgtgcacctgttgtccagctatttaggaggctgaggtgaaaggatcacttgaacggaggagttcaaatttgcaatgtgctatgattgtgcctgtgaacagctgctgcactccagcctgggcaacatagtgagatcccttatctaaaacattttttttaagtaaataatcaggtgggcacggtggctcacgcctgtaatccagcactttgggaggctgaggcgggcggatcacctgaggtcaggagttcaagaccagcctgaccaacatggagaaacccgtctctactaaaaatacaaaattagcttggcgtggtggtgcatgcctgtaatcccagctactcgagaagctgaggcaggagaattgtttgaacctgggaggtggaggttgcggtgagccgagatcgcaccattgcactccagcctgggcaacaagagtgaaattgcatctcaaaaaaaaagaaaaggaaataatctataccaggcactccaagtggtgtgactgatattcaacaagtacctctagtgtgaccttaccattgatgaagaccaagattcttttggattggtgctcacactgtgccagttaaatattccgaacattacccttgcctgtgggcttccagtgcctgaccttgatgtcctttcacccatcaacccgtagggatgaccaacccggaggtgattcagaacctggagcgaggctaccgcatggtgcgccctgacaactgtccagaggagctgtaccaactcatgaggctgtgctggaaggagcgcccagaggaccggcccacctttgactacctgcgcagtgtgctggaggacttcttcacggccacagagggccagtaccagcctcagccttgagaggccttgagaggccctggggttctccccctttctctccagcctgacttggggagatggagttcttgtgccatagtcacatggcctatgcacatatggactctgcacatgaatcccacccacatgtgacacatatgcaccttgtgtctgtacacgtgtcctgtagttgcgtggactctgcacatgtcttgtacatgtgtagcctgtgcatgtatgtcttggacactgtacaaggtacccctttctggctctcccatttcctgagaccacagagagaggggagaagcctgggattgacagaagcttctgcccacctacttttctttcctcagatcatccagaagttcctcaagggccaggactttatctaatacctctgtgtgctcctccttggtgcctggcctggcacacatcaggagttcaataaatgtctgttgatgactgttgtacatctctttgctgtccactctttgtgggtgggcagtgggggttaagaaaatggtaattaggtcaccctgagttggggtgaaagatgggatgagtggatgtctggaggctctgcagaccccttcaaatgggacagtgctcctcacccctccccaaaggattcagggtgactcctacctggaatcccttagggaatgggtgcgtcaaaggaccttcctccccattataaaagggcaacagcattttttactgattcaagggctatatttgacctcagattttgtttttttaaggctagtcaaatgaagcggcgggaatggaggaggaacaaataaatctgtaactatcctcagatttttttttttttttgagactgggtctcactttttcatccaggctggagtgcagtcgcatgatcacggctcactgtagcctcaacctctccagctcaaatgctcctcctgtctcagcctcccgagtacctgggactactttcttgaggccaggaattcaagaacagagtaagatcctggtctccaaaaaaagttttaaaaaaatcaaacacacttagccgagcatagtagctcatgcttgtagtcccagcagatcaggaggctgaggcatgaggattgcttgagatatgattgtgccactgtggcactccagagtaggcgacgaagggagatcctgtctcaaaaaaaaaaaaaaaaaaaaagggaaggcttcattgagaaggtaggtggcttttgagcaaagattccaaggtgaaggagtgagccttgtatggaggaggggaggagcagtcagccagagggaacagggtgaggcaggcgtttaccgggcatgctctgagagagggggatagatcctacaggcctggggccttgtggcctctgcagaagccattttgaggaaactttgcaggaatctctgcaaagctgatatgatctgaattacattttattttatttatttatttttgaaataaataatgaaattatttatttattttttcttgctctgtcgcccaggctggagtgcagtggcgcgatctcggctcactgcaagctctgcctcccgggttcatgccattctcctgcctcagtctcccgagtagctgggactacaggcgtccaccaccaagcctgggtaatttttttgtatttttagtagagatggggtttcaccgtgttagccaggatggtctggatctcctgaccttgtgatccgcctgcctcggcctcccaaagtgctgggattacaggtgtgagccaccacacccggcctcttttttttatttttaattgagatggggtctcactctgtcacccaggctggagaacaaaggtgaaatctcggctccctgcagcctctgcctcctgggctcaaacaatcctcccacctcagcctcctcagtagctgggaccacaggcatacaccaacactcccggctaattttttgtattttcggtggagacggggtttcaccatgttgcccaggctgatctcaaactcctaagctcaagtgatccatgttcctcagcctcccaaagtgctgggattataggcgtgagccatagcgtccagccctgacttacattttaaaaggatggctcttgctgctgtcttgaaaatagactgagttagtcagtttataaaactggggagattttgcataaaactccagatttctgccttctcttgaaaaataggggctaggtgcgttggctcactcctataatcccagcattttggaaggccaaggtgggcagattgcttgagcccaggagtttaagaccagactggacaacatggcaaaaccctgtctctaccaaaaaaaaaaaaaaattagcagggtgtggtggtgcacacctgcagtcccagctactcaggaggcaagcttgtattcctagctacttaggaggatagtttgagcccaggaagtcaaggctgcagtgagcatgatcctgccattgcactccagccagagcaaaaaagagagcgaaaccccatctcaaaaaaaagggaagatttagctatgttggacttacctgtcctcatggagctgaataatggccacccctccaggtagggcctgaactctacctttgccagagtcccctccactccctgttggtcttagacaatgaaactgagtgttagtagctatttaccaccaagctcatgcttgttgttcttataataaagataaatggtttaataaatggtatgataaagaaaattatattatggtattataccatttaataaatggtataataaagaaaatggttttttgcacccacatttccattaaaaagtgagaaaattaaagatacctgaggatggcagagtgtttgatgaaagatagggaaatgttggccaggcaccgtgggtcacacctgtaatcccagcagtttaggaggccggggcaggcggatcacaaggtcaggagttcaagatcagcctggccaacatagtgaaaccccgtctttactaaaaatacaaaaaattagccgggagtggtggcaggtgcctacaatcccagctactcggaaggctgaatggcgcgatctcagctcattgcaacctctgcctcccaggttcaagccattcttctgccttagcctccctagtagctgggattacaggcgcctgccaccatgcctagctaatttttatatttttagtagacgtggggtttcgccatgttggccaggctggtctcaaactcctgaccttgggtgatctgcccgcctcggtctcccaaactgctgggattacaggagtgagccacagtgcccggcctctaatttttatttttaatttttttaatttttatttttttaatttttattttatttattttttgtaatttttaaaatatacaaaaaaagggccgggtgtggtggctcacgcctgtaatcccagcactttttgggaggctgaggtgggtggatcacgaggtcaggagatcgagaccatcctggctaacatggtgaaaccctgtctctactaaaaatataaaaaaattagccgggcctggtggcaggtgcctgtagtcccagctactcgggaggctgagacaggagaatggcgtgaactcgagaggtggagcttgcagtgagccaagatcgcaccactacactccagcctgggcgacagagtgagacttcatctcaaaaaaaaaaaaaattatatatatatatatacatatatatatgcaaacaaagagcatctgagtcataataatgtaaatctatcacctgactgacctgctgccacacctcatgatctcatctgatccccacactccttctctttgggatactgtgtacagccatagcgtgggtgaactttgtattcctatcctccccatttttgttattttattttatttcttatttatttgagacagagtctcactctgtcatccagactgtaatgcagtggcctgatctcggctcactgcaacctccacctcccggtttcaagcgaatctcctgcctcagcctcctaagtagctgggacctacaggcacacaccaccacgcccagctaatttttgcatttttaatagagacggggtttcaccgtgctgggcaggctggtctcgaactcctgacctcaggtgatttgcccacctcagccttccaaattgttaggattacaggcatgagtcactgtgcccggcctcctccccattttataacaagggaaatggaggcccagaatggttaagtaaacccacccagggctagctgagaattagcaacagagaactgggagtagaatttgttccctggccctttgctgtttctattataagccacccagtcttagattttctgttaccttataattaatgactcaaatgcagtttctgagtgagaaacacaagtcccaaacactctttaaagaggcataaagatgtatcttgttgttttcttttgtttgagacaaggcctggctctattgcccaggctggagtgtggtgacatgatcttggctcactgcaacatctgtctcctgggctcaagccatcatcccacctcagcctcctgagtagctggaactacaggagcgcgcccccacacctgggtaatttttctattttttgtagagatggggttttgccatgttgcccaggctggtctcgaactcctgagctcaagtgatccacccatcttggcctcccaaagtgctgggattacaggcgtgagccactgtgcccagcctcttgttgactgtaggaccacaagttggcggctaacttagagcaatgtttggcacacaggaagcactcattaaatattgacattattgtagttattttaatagcccagcattgcacttttaggtctttcagctttcagtgatgatcagttgataattgatgatctggtggagtggttcttaatggtagagttgggggcaattttacactcccttacaccccactaatcttccccccaacccaatggtaaagctattgcacagtacttggcaatgtctagagacaattttggttgtcacagcctggggggaaggtgctactggcatctagtgggtagaggctaaggatgctgcttaattttttttttttttgagacaagagtttcactctagttgcccaggcacagaacagcttcacagaagctgttaatgcacagaatagcttcctacaaaaaagcattacctggcccaaaatgtcattagctaccaggctgagaaacctgccctcctaggccgggcgctgtggctcacgcccgtaatctcagcatattgggaggccgaggtgggcggatcctgaggtcaggagttcgagaccacctggaccaacacggagaaacccagtctctaccaaaaatacaaaattagccgggcatggtggcacatgcttgtaatcccagctactcgggaggctgaggcaggagaaccgcttgaacacagaggcagagattgtggtgagccgagatcacaccattgcactccagcctgggcaactagagcgaaactcttgtctcaaaaaaaaaaaaaaaaaaaaaaacagggaaagaaaagaaaggaaacctgccctcctatcataggataatcccatttcctcctgtctaaagagacgcctacttagtcatcctgggtgactgcatcagggaggtagattttggagtctgaaaggctgggttctgtcactttgttacagtgcctctggtgcaaagaaagcattttaaaaaccctgtacaattaaaaaattgaatttaattactttgtgtaactttgaataattcacagaagtctgaacttctttatcctgtcctgtaaaatggaggtaaaaagcccttggccgagagctgttttgaggaaaaactgaaataacattggtaaagtgtcgcacagtacttggcacacagcagcccctcgacaaacattagctttctttccctttcttgtcggtttcttcctctccaaacccgcgtgttgcttttctttttaattatttttctgtagccctcctttgcggccacaaactcgctttctaacccaggttcagcccttttattggctgagtgaccttgtgcaagtcacttttcccctgtaggcctcggtttattctccgtaaaatcagaaagttggcctccgatctccaagcacgcttttcacgacgaagtgggactgttaagtttacagagctgctttcctcccccgggactgatggtacggtccccgggcggctccccacccatctgtcgcagaccttggtacaggcccagggggccctcggcggcctctccgggctgcccttgccccctgccgagttccgggcccgtgtctgcgcaagctgattggctggagcggtgcccgggctgcgcggctataggtgagcccaggaggggacgggcggggcgttataacaaaaacttcttctgaaataccttttcccctcatatatgttgtgatatctacattcgtatattgatatccatttttattctccctattgcgattgctatgttatatttgtatacttattggtagcgatatagtgctcacacccaactttgatgatctatattttattcttaatccttaatttacttaataacttgtttgacaatttatatttatccttctgatgtgtgtgtcctctatcagtcttcgtgtttcttgttcgcttccgcgtacatttggaaatcagcaccttcgtaagtctagaaacactctcctactactattccctagttctttctagtatatatacaccgcgtaatgcccatcacaaatttccaccaaatattcacacttatcataacttgatcatatgtttataacgttacaattttgactagtttgtttattaattatatatagatcatatcttattagggcgtaggtataacatctatatagataccgctctgtacttatatcaattctatctcttttatttcattgtcatctcgcgtctgctgtgctcactattgcatcttttcagttccccatacctcaatcacttacttacaaatcgtcgtataagtagtacattaactaacaattaactcgtcgatacatctgacgctattgttatttatacctggatatagtcgcataactgctctctcctctgaatctactcttccttactctctaacatcacttttcactccgctccttacaatcatcttaatgacgtttcattctctgaatagtttnnnnnnnnnnnnnnnnnnnnnnnnnnnnnnnnnnnnnnnnnnnnnnnnnnnnnnnnnnnnnnnnnnnnnnnnnnnnnnnnnnnnnnnnnnnnnnnnnnnnnnnnnnnnnnnnnnnnnnnnnnnnnnnnnnnnnnnnnnnnnnnnnnnnnnnnnnnnnnnnnnnnnnnnnnnnnnnnnnnnnnnnnnnnnnnnnnnnnnnnnnnnnnnnnnnnnnnnnnnnnnnnnnnnnnnnnnnnnnnnnnnnnnnnnnnnnnnnnnnnnnnnnnnnnnnnnnnnnnnnnnnnnnnnnnnnnnnnnnnnnnnnnnnnnnnnnnnnnnnnnnnnnnnnnnnnnnnnnnnnnnnnnnnnnnnnnnnnnnnnnnnnnnnnnnnnnnnnnnnnnnnnnnnnnnnnnnnnnnnnnnnnnnnnnnnnnnnnnnnnnnnnnnnnnnnnnnnnnnnnnnnnnnnnnnnnnnnnnnnnnnnnnnnnnnnnnnnnnnnnnnnnnnnnnnnnnnnnnnnnnnnnnnnnnnnnnnnnnnnnnnnnnnnnnnnnnnnnnnnnnnnnnnnnnnnnnnnnnnnnnnnnnnnnnnnnnnnnnnnnnnnnnnnnnnnnnnnnnnnnnnnnnnnnnnnnnnnnnnnnnnnnnnnnnnnnnnnnnnnnnnnnnnnnnnnnnnnnnnnnnnnnnnnnnnnnnnnnnnnnnnnnnnnnnnnnnnnnnnnnnnnnnnnnnnnnnnnnnnnnnnnnnnnnnnnnnnnnnnnnnnnnnnnnnnnnnnnnnnnnnnnnnnnnnnnnnnnnnnnnnnnnnnnnnnnnnnnnnnnnnnnnnnnnnnnnnnnnnnnnnnnnnnnnnnnnnnnnnnnnnnnnnnnnnnnnnnnnnnnnnnnnnnnnnnnnnnnnnnnnnnnnnnnnnnnnnnnnnnnnnnnnnnnnnnnnnnnnnnnnnnnnnnnnnnnnnnnnnnnnnnnnnnnnnnnnnnnnnnnnnnnnnnnnnnnnnnnnnnnnnnnnnnnnnnnnnnnnnnnnnnnnnnnnnnnnnnnnnnnnnnnnnnnnnnnnnnnnnnnnnnnnnnnnnnnnnnnnnnnnnnnnnnnnnnnnnnnnnnnnnnnnnnnnnnnnnnnnnnnnnnnnnnnnnnnnnnnnnnnnnnnnnnnnnnnnnnnnnnnnnnnnnnnnnnnnnnnnnnnnnnnnnnnnnnnnnnnnnnnnnnnnnnnnnnnnnnnnnnnnnnnnnnnnnnnnnnnnnnnnnnnnnnnnnnnnnnnnnnnnnnnnnnnnnnnnnnnnnnnnnnnnnnnnnnnnnnnnnnnnnnnnnnnnnnnnnnnnnnnnnnnnnnnnnnnnnnnnnnnnnnnnnnnnnnnnnnnnnnnnnnnnnnnnnnnnnnnnnnnnnnnnnnnnnnnnnnnnnnnnnnnnnnnnnnnnnnnnnnnnnnnnnnnnnnnnnnnnnnnnnnnnnnnnnnnnnnnnnnnnnnnnnnnnnnnnnnnnnnnnnnnnnnnnnnnnnnnnnnnnnnnnnnnnnnnnnnnnnnnnnnnnnnnnnnnnnnnnnnnnnnnnnnnnnnnnnnnnnnnnnnnnnnnnnnnnnnnnnnnnnnnnnnnnnnnnnnnnnnnnnnnnnnnnnnnnnnnnnnnnnnnnnnnnnnnnnnnnnnnnnnnnnnnnnnnnnnnnnnnnnnnnnnnnnnnnnnnnnnnnnnnnnnnnnnnnnnnnnnnnnnnnnnnnnnnnnnnnnnnnnnnnnnnnnnnnnnnnnnnnnnnnnnnnnnnnnnnnnnnnnnnnnnnnnnnnnnnnnnnnnnnnnnnnnnnnnnnnnnnnnnnnnnnnnnnnnnnnnnnnnnnnnnnnnnnnnnnnnnnnnnnnnnnnnnnnnnnnnnnnnnnnnnnnnnnnnnnnnnnnnnnnnnnnnnnnnnnnnnnnnnnnnnnnnnnnnnnnnnnnnnnnnnnnnnnnnnnnnnnnnnnnnnnnnnnnnnnnnnnnnnnnnnnnnnnnnnnnnnnnnnnnnnnnnnnnnnnnnnnnnnnnnnnnnnnnnnnnnnnnnnnnnnnnnnnnnnnnnnnnnnnnnnnnnnnnnnnnnnnnnnnnnnnnnnnnnnnnnnnnnnnnnnnnnnnnnnnnnnnnnnnnnnnnnnnnnnnnnnnnnnnnnnnnnnnnnnnnnnnnnnnnnnnnnnnnnnnnnnnnnnnnnnnnnnnnnnnnnnnnnnnnnnnnnnnnnnnnnnnnnnnnnnnnnnnnnnnnctgacctccagtgctccatctgcctcagcctcccaaagtgctgggattataggcatgagccacacttcctggcctctgatgtgggcaatttgatggtgagtgtttggaggtttggagaatgccatgtcagttgataacttttttttttttttttttttgagatggagtctcgctctgtcgcccaggctggagtgcagtggcgcaatctcggctcactgctgcaagctccacctcccgggtccatgccattctcctgcctcagcctctccagtagctgggactacaggcgcccgccaccacactgggctgattttttgtatttttagtagagacagggtttcaccgtgttagccaggatggtctggatctcctgacctcatgatccgcccgcctcggcctcccaaagtgctgggattacaggtgtgagccaccgcacccggccccaactttttttttttttttttaaacttctagagatggggtctcaatatgttgcctgggcttgtcttgaactcctgtgcctggcctcaagcaatcctgccaccttggcctcccaaagtgctgggattacaggcctaagccactgttttttttgttgttgttgtttgtttgtttagaaataactattgataactgttaagatgtttaggggacatccaagtagaggcatccagtaggcagtttagaagatagaaattttttggtagtcatcagtatcttagtctgctataacagaacactgtttataaagaacagaaattgctgaatgtggtggctcacgcctataatcccagtactttggtaggctggggcggatggttctcttgagcccaggagtttgagaccagcctgggcaacttagggagactctgtctctacaaaaagtaaaaaaattagctgggcatgatggcatgtgcctgtagagaggctgaagtgggaggatcacttgatcctgggaggtcgactctgcagtgagccatgatcgcaccagtgcactccagcctgggggacagagtgagaccttgtgtcaaaaaaaaaaaaagaacataaatgtatttctcatagttctggaggctgagaagtccaaggctagaa

SEQ ID NO: 233 - DNA, 2032 bp, Homo sapiens
cgcctggaccatgtgaatggggccagagggctcccgggctgggcagggaccatgggctgtggctgcagctcacacccggaagatgactggatggaaaacatcgatgtgtgtgagaactgccattatcccatagtccgactggatgggaagggcaggctgctcatccgaaatggctctgaggtgcgggacccactggttacctacgaaggctccaatccgccggcttccccactgcaagacaacctggttatcgctctgcacagctatgagccctctcacgacggagatctgggctttgagaagggggaaccactccgcatcctggagcagagcggcgagtggtggaaggcgcagtccctgaccacgggccaggaaggcttcatccccttcaattttgtggccaaagcgaacagcctggagcccgaaccctggttcttcaagaacctgagccgcaaggacgcggagcggcagctcctggcgcccgggaacactcacggctccttcctcatccgggagagcgagagcaccgccgggtccttttcactgtcggtccgggacttcgaccaaaaccagggagaggtggtgaaacattacaagatccgtaatctggacaacggtggcttctacatctcccctcgaatcacttttcccggcctgcatgaactggtccgccattacaccaatgcttcagatgggctgtgcacacggttgagccgcccctgccagacccagaagccccagaagccgtggtgggaggacgagtgggaggttcccagggagacgctgaagctggtggagcggctgggggctgcacagttcggggaggtgtggatggggtactacaacgggcacacgaaggtggcggtgaagagcctgaagcagggcagcatgtccccggacgccttcctggccgaggccaacctcatgaagcagctgcaacaccagcggctggttcggctctacgctgtggtcacccaggagcccatctacatcatcactgaatacatggagaatgggagtctagtggattttctcaagaccccttcaggcatcaagttgaccatcaacaaactcctggacatggcagcccaaattgcagaaggcatggcattcattgaagagcggaattatattcatcgtgaccttcgggctgccaacattctggtgtctgacaccctgagctgcaagattgcagactttggcctagcacgcctcattgaggacaacgagtacacagccagggagggggccaagtttcccattaagtggacagcgccagaagccattaactacgggacattcaccatcaagtcagatgtgtggtcttttgggatcctgctgacggaaattgtcacccacggccgcatcccttacccagggatgaccaacccggaggtgattcagaacctggagcgaggctaccgcatggtgcgccctgacaactgtccagaggagctgtaccaactcatgaggctgtgctggaaggagcgcccagaggaccggcccacctttgactacctgcgcagtgtgctggaggacttcttcacggccacagagggccagtaccagcctcagccttgagaggaggccttgagaggccctggggttctccccctttctctccagcctgacttggggagatggagttcttgtgccatagtcacatggcctatgcacatatggactctgcacatgaatcccacccacatgtgacacatatgcaccttgtgtctgtacacgtgtcctgtagttgcgtggactctgcacatgtcttgtgcatgtgtagcctgtgcatgtatgtcttggacactgtacaaggtacccctttctggctctcccatttcctgagaccaccagagagaggggagaagcctgggattgacagaagcttctgcccacctacttttctttcctcagatcatccagaagttcctgaagggccaggactttatctaatacctctgtgtgctcctccttggtgcctggcctggcacacatcaggagttcaataaatgtctgttgatgactgccg

SEQ ID NO: 234 - DNA, 1530 bp, Homo sapiens
atgggctgtggctgcagctcacacccggaagatgactggatggaaaacatcgatgtgtgtgagaactgccattatcccatagtccgactggatgggaagggcaggctgctcatccgaaatggctctgaggtgcgggacccactggttacctacgaaggctccaatccgccggcttccccactgcaagacaacctggttatcgctctgcacagctatgagccctctcacgacggagatctgggctttgagaagggggaaccactccgcatcctggagcagagcggcgagtggtggaaggcgcagtccctgaccacgggccaggaaggcttcatccccttcaattttgtggccaaagcgaacagcctggagcccgaaccctggttcttcaagaacctgagccgcaaggacgcggagcggcagctcctggcgcccgggaacactcacggctccttcctcatccgggagagcgagagcaccgccgggtccttttcactgtcggtccgggacttcgaccaaaaccagggagaggtggtgaaacattacaagatccgtaatctggacaacggtggcttctacatctcccctcgaatcacttttcccggcctgcatgaactggtccgccattacaccaatgcttcagatgggctgtgcacacggttgagccgcccctgccagacccagaagccccagaagccgtggtgggaggacgagtgggaggttcccagggagacgctgaagctggtggagcggctgggggctgcacagttcggggaggtgtggatggggtactacaacgggcacacgaaggtggcggtgaagagcctgaagcagggcagcatgtccccggacgccttcctggccgaggccaacctcatgaagcagctgcaacaccagcggctggttcggctctacgctgtggtcacccaggagcccatctacatcatcactgaatacatggagaatgggagtctagtggattttctcaagaccccttcaggcatcaagttgaccatcaacaaactcctggacatggcagcccaaattgcagaaggcatggcattcattgaagagcggaattatattcatcgtgaccttcgggctgccaacattctggtgtctgacaccctgagctgcaagattgcagactttggcctagcacgcctcattgaggacaacgagtacacagccagggagggggccaagtttcccattaagtggacagcgccagaagccattaactacgggacattcaccatcaagtcagatgtgtggtcttttgggatcctgctgacggaaattgtcacccacggccgcatcccttacccagggatgaccaacccggaggtgattcagaacctggagcgaggctaccgcatggtgcgccctgacaactgtccagaggagctgtaccaactcatgaggctgtgctggaaggagcgcccagaggaccggcccacctttgactacctgcgcagtgtgctggaggacttcttcacggccacagagggccagtaccagcctcagccttga

SEQ ID NO: 235 - DNA, 59394 bp, Mus musculus
  misc_feature (4271)..(6912): "n" at positions 4271 through 6912 can be any base.
  misc_feature (26986)..(27005): "n" at positions 26986 through 27005 can be any base.
gggactacatgttggaaccttatcttaaacacacacagatacacacacacacacacacacacacacacacacacacacacacacacaaagcagggcctggagaggtgccttagtgtgtaaagaaagtgcttgcatcaggtcctgaagtcagaccccccacccagtgcccatgtaaaagccaggcatgacacacacctgtcaccccagcactagggacacagaatcaggagcatcccggggaaccaatggccagccgctctaggggaaatcatgagctgcgggttcagtgataaagcttgtctcaaaaagtaaggtagagaaatgattgaggaagacaccccaacatcaacctctggcctcccggctccctcacaggcaagcacaaccaggaacacacacacacacacatacatacaccatacaaacacaaaccacacagccacaccacacccacacatatgcacacaaacacaaatgcataccaaataagaataaataaaaatacaaaattttgcttttcatttctcttcttttcgtctttctctccagagcgaggggaggagagacagagacaggattcagacagagcacagcacccctctccagtttcaaatgacggctcaggcacaggcaaagcatgcaagtgagaggctcttcaggtctctaggacaggaagcacagcgacctgacctacctcagagagtaggcagaactaaattaaagatctgagacccatgagcgctctcgctctctctctctcattacacacacacacacacaatttagacctaaaaaaaaaaaagaacaaccccacaattttataagaaaaaaatatttagcaaaaatatttagcagaagctggccacaccgtcttttaattccagccctcagaagattgactgaggcgggaggacagccatgagttcaaggctggcctagactacatagtaaagttccaggccacccaaattcacaggtgatcattcaacaagggcaagccacacgccccccccccccccccacaactcagcactggtactgaccactaaactcaactgcctcccggtcgaagaggaaggtggctatttcttaaccaatggagaatctgaatgaacacacacttcctgctgtgtggcttaaggatattctagcaatatggattatcttgaccccaaaccagtcatataagttacaatataatgaaagtccaagatgccccttattcaaaatagtgaaaaatttcataaccgtgacaacagagaggaggcagccctccactgctactccgtccctgctgaagttcaactgtatggttatgaccggcaagatgtccatgtcaaggtctactccctagacacaagtgctacactgtcaagggacccattgtgttaaattagggcagtgtcaaaaccagaggaccagaggatcggcaagtatgagcattcgctcaaccttgaagtcaagggcagcaatgaccttaagttttctcccatagaatctactgcaagactttaattcccaagccctgccaagccttgccaccccaggactggggaggttaagaagggaggccactgaggaggtttgaggccagcctgggccacacagatgacttgcaggccacctagatgtacacagtaacaccctgtctcaaaattagaagattttaattcccaaattttaattccaaacgtcctcaagatttgtcatggtcaaagacaggagaatgtccccgggtacctttatcgccattttcaggaaatggtgactgggtcacagctgagatcttgaccaaggtgcgcctcttacttctgcagacagctcttcctcctcagtgaggagaaagctgcttacagaactcaggcctgaagcccgtggtgtgatgacaacaaaccttcctatcaaatgcgatttaacctcgtgactctgtactttcaacggtgctcggtgctcgggattcgaaccactgtgtacagcagaacccgtgccaaggctggatggaaccggaaccgggacccttccacgtcctagccccgggcgatacacctgcttcaactcctttttctgcatttttttttcatttttttaaaagatttatttattgattatatgtaagtacactgtagctgtctttagacaccccagaagagggagtcagatctcgttacggatggttgtgagccaccatgtggttgctgggatttgaactctggaccttcggaagagcagtcgggtgctcttacccactgagccatctcgccagcccttttttttcatttctattttgagacagagtcaaacttgcccagactggccttgaacctgtcattctcctgcctcagcctccacgacagctgtgggccaccgtgtccagtcaaaactggttactgcttctttgaaatgtccagagtgggccttgaggataggcagaagagcttctcgcttagattctagagaaggcctctgagctgtgtgtgtgatgcaaagagttatatcagcaggtatactgggatgcctgaatcatcctctctgggggcatgtgtcatatctctttaaatcctaagtcgttactgtgccatctaattaagaacaatgactcttacaaaaccgtcttctgtctggactaccctcccctgccccacacacacctgaggatgaaacccagggcctctcacacaatggacaagtgttggggccactgcgatacacacagtctcatcctttcttatttattttctgacagatcatcaccaagttgcccaggctagcctccaaatcttcctgcttcaacttcctgagtgtcttgggttacccgtgtacaccgccacacccgccatggaatcctttttttaaatgccacttctgacttcccatgctgcccatacaactaaatatatatatatatatggcaagctgcaaaccaacacttagaaccgttccaacagcgcttcgatgtggggctggcccaatgtttaccaatcaaaagaaccaagggttcgcaacaattactgagtcagtggttaagtcattcaaaagcaaggctctgacacactggctaagacgaatgaatgaagccaaaccgtaacaattatggcggatttcgggagtaattataaatccttatctcatttgctacaggctagagagcaactcagggcacccgtgcctaatgaaatgactgcagtgccattaatggcaggtgtctcattcctggtgggcggctctgcctttcagcaggctacccctcccccaagttagaagccagcctgagctacacagtgaattctaggctaagcagggctatacagtgagaccctgtctcaagcaaaaagaacaaaaaccaagaaacccaaacaaatgaaataagaattcatattaatgcaaagattcttcaccacggctctaactaacattggagtctgataacactcagtggtgggtgagtggctgccttgaacactgtaaggcacagcgaggtcgctggcctctccccaatgccatgccaacagcacccacctctaaagtcaacccaacccaaaacgtcttgtctccttgcattcccaaatattcactatcatcttcatctgagaaccactgatttacagaggtgggaagaaaagaaaaaaaaaaaaaaaaaaaaaaaaaaagcacttcagaacaggaaggtcctaaggagtctgagcagcagagattctcaaaccaaccaccctggggagctcgttaaaaccccgattcctaggcccagccgcagccccatcaatttagacaagtactgggttttccgtcgtcactgcctccatcctcatccaatgggtaaggaaaagtggggtccccccaacgtaactgctttgcccaaggtcacaagagagttagaaccaggccaccgaagccaaccaagctcttccccagcaccagggcgggtggagtaaggtgtgtttcttccgtcttcaaggccataaagcttaaaggtgaattctggggccagcgagcctgagataaacgatctggacgtggttttcattagcccgatggccttgcgccttgcgcaaggcaagtaggctctggggtctcagtttccttctctgtcaaatggaacaataagcgctcattcctaacgatatcagaaagaggagaatggaccaaaagcccccggcaccgagcccggtctacggtaagcgctctatggatcccggggctcaggaggagaacggatcccgactccgcgccgcgcacctcacctggtcccgcagctccttctccagctgctcgtnnnnnnnnnnnnnnnnnnnnnnnnnnnnnnnnnnnnnnnnnnnnnnnnnnnnnnnnnnnnnnnnnnnnnnnnnnnnnnnnnnnnnnnnnnnnnnnnnnnnnnnnnnnnnnnnnnnnnnnnnnnnnnnnnnnnnnnnnnnnnnnnnnnnnnnnnnnnnnnnnnnnnnnnnnnnnnnnnnnnnnnnnnnnnnnnnnnnnnnnnnnnnnnnnnnnnnnnnnnnnnnnnnnnnnnnnnnnnnnnnnnnnnnnnnnnnnnnnnnnnnnnnnnnnnnnnnnnnnnnnnnnnnnnnnnnnnnnnnnnnnnnnnnnnnnnnnnnnnnnnnnnnnnnnnnnnnnnnnnnnnnnnnnnnnnnnnnnnnnnnnnnnnnnnnnnnnnnnnnnnnnnnnnnnnnnnnnnnnnnnnnnnnnnnnnnnnnnnnnnnnnnnnnnnnnnnnnnnnnnnnnnnnnnnnnnnnnnnnnnnnnnnnnnnnnnnnnnnnnnnnnnnnnnnnnnnnnnnnnnnnnnnnnnnnnnnnnnnnnnnnnnnnnnnnnnnnnnnnnnnnnnnnnnnnnnnnnnnnnnnnnnnnnnnnnnnnnnnnnnnnnnnnnnnnnnnnnnnnnnnnnnnnnnnnnnnnnnnnnnnnnnnnnnnnnnnnnnnnnnnnnnnnnnnnnnnnnnnnnnnnnnnnnnnnnnnnnnnnnnnnnnnnnnnnnnnnnnnnnnnnnnnnnnnnnnnnnnnnnnnnnnnnnnnnnnnnnnnnnnnnnnnnnnnnnnnnnnnnnnnnnnnnnnnnnnnnnnnnnnnnnnnnnnnnnnnnnnnnnnnnnnnnnnnnnnnnnnnnnnnnnnnnnnnnnnnnnnnnnnnnnnnnnnnnnnnnnnnnnnnnnnnnnnnnnnnnnnnnnnnnnnnnnnnnnnnnnnnnnnnnnnnnnnnnnnnnnnnnnnnnnnnnnnnnnnnnnnnnnnnnnnnnnnnnnnnnnnnnnnnnnnnnnnnnnnnnnnnnnnnnnnnnnnnnnnnnnnnnnnnnnnnnnnnnnnnnnnnnnnnnnnnnnnnnnnnnnnnnnnnnnnnnnnnnnnnnnnnnnnnnnnnnnnnnnnnnnnnnnnnnnnnnnnnnnnnnnnnnnnnnnnnnnnnnnnnnnnnnnnnnnnnnnnnnnnnnnnnnnnnnnnnnnnnnnnnnnnnnnnnnnnnnnnnnnnnnnnnnnnnnnnnnnnnnnnnnnnnnnnnnnnnnnnnnnnnnnnnnnnnnnnnnnnnnnnnnnnnnnnnnnnnnnnnnnnnnnnnnnnnnnnnnnnnnnnnnnnnnnnnnnnnnnnnnnnnnnnnnnnnnnnnnnnnnnnnnnnnnnnnnnnnnnnnnnnnnnnnnnnnnnnnnnnnnnnnnnnnnnnnnnnnnnnnnnnnnnnnnnnnnnnnnnnnnnnnnnnnnnnnnnnnnnnnnnnnnnnnnnnnnnnnnnnnnnnnnnnnnnnnnnnnnnnnnnnnnnnnnnnnnnnnnnnnnnnnnnnnnnnnnnnnnnnnnnnnnnnnnnnnnnnnnnnnnnnnnnnnnnnnnnnnnnnnnnnnnnnnnnnnnnnnnnnnnnnnnnnnnnnnnnnnnnnnnnnnnnnnnnnnnnnnnnnnnnnnnnnnnnnnnnnnnnnnnnnnnnnnnnnnnnnnnnnnnnnnnnnnnnnnnnnnnnnnnnnnnnnnnnnnnnnnnnnnnnnnnnnnnnnnnnnnnnnnnnnnnnnnnnnnnnnnnnnnnnnnnnnnnnnnnnnnnnnnnnnnnnnnnnnnnnnnnnnnnnnnnnnnnnnnnnnnnnnnnnnnnnnnnnnnnnnnnnnnnnnnnnnnnnnnnnnnnnnnnnnnnnnnnnnnnnnnnnnnnnnnnnnnnnnnnnnnnnnnnnnnnnnnnnnnnnnnnnnnnnnnnnnnnnnnnnnnnnnnnnnnnnnnnnnnnnnnnnnnnnnnnnnnnnnnnnnnnnnnnnnnnnnnnnnnnnnnnnnnnnnnnnnnnnnnnnnnnnnnnnnnnnnnnnnnnnnnnnnnnnnnnnnnnnnnnnnnnnnnnnnnnnnnnnnnnnnnnnnnnnnnnnnnnnnnnnnnnnnnnnnnnnnnnnnnnnnnnnnnnnnnnnnnnnnnnnnnnnnnnnnnnnnnnnnnnnnnnnnnnnnnnnnnnnnnnnnnnnnnnnnnnnnnnnnnnnnnnnnnnnnnnnnnnnnnnnnnnnnnnnnnnnnnnnnnnnnnnnnnnnnnnnnnnnnnnnnnnnnnnnnnnnnnnnnnnnnnnnnnnnnnnnnnnnnnnnnnnnnnnnnnnnnnnnnnnnnnnnnnnnnnnnnnnnnnnnnnnnnnnnnnnnnnnnnnnnnnnnnnnnnnnnnnnnnnnnnnnnnnnnnnnnnnnnnnnnnnnnnnnnnnnnnnnnnnnnnnnnnnnnnnnnnnnnnnnnnnnnnnnnnnnnnnnnnnnnnnnnnnnnnnnnnnnnnnnnnnnnnnnnnnnnnnnnnnnnnnnnnnnnnnnnnnnnnnnnnnnnnnnnnnnnnnnnnnnnnnnnnnnnnnnnnnnnnnnnnnnnnnnnnnnnnnnnnnnnnnnnnnnnnnnnnnnnnnnnnnnnnnnnnnnnnnnnnnnnnnnnnnnnnnnnnnnnnnnnnnnnnnnnnnnnnnnnnnnnnnnnnnnnnnnnnnnnnnnnnnnnnnnnnnnnnnnnnnnccacccccgattttgcctctgcgtgaccttggaccgatgagttctcttgctcaaaccttgatttcctccgggttttttttcccccccacccactgctggaaactatggccaatgcagtgcgcagtggtcaatggacattccccggggatcggctcctttcgtaggataactcagttcaaaacccttgtagttccttcagccacagtctggcttcagattcacactgtcactcgcagcgacttcgaaccgccaaaactgttctaaactgcagataggatttggatttgaagattggatctggctttgtaattggaacccaactgacaggtctcgatcctgattttgtgtgtgtgtgtgtgtgtgtgtgtgtgtgtgtgtgtgtgcttgctttggtccttggacttttcgggtttgaagtcaaatatcagatgactttcctggtgtagcagtgttcaatagacagtcttaattaagccattgaacgtcagcggcttgcaacagatttttctcttcgtcttgtcatttggaagcagagactggttttaagtggtacggtggtaaccagtactggttatttcatggccctgggtcctacaggttaacaaatggaagataaggagaggcagaggcacttttaaaagagatgctttgtttgcaagccgcgtttatacaaactattatttggctaacgatgttgtgtgttccgcttccttcttttcttgcttgtgttccgttgattcatgtctaacttaaaacttcctcttgggatgcttgcttcttacttctccagggattggtccgtggtagaggcgggctgcctccccttgccaccccgatactgtcttgtccattttgtggtgttttggggccttttctattgtttcatattagaggtcttgaatgccaacatctagaaaggcttgagtcacttcctgttttgaatagaatgaagctaccttgaaggctgaggaacagctaggaataggtgctgccttttgtgcacagctcaggggaaaggttacctgtaggagtaggctcctttgaaatcctcatgctaaggccttctcagaagatgctcagacagacatttgactctcctggacgtttgcagaagatgggtgggggcacagatacttttgaagtccacttgtgttgttcctggagcctgattaaaaagtcctgcctttccgggcgtggtggcactcgcctttaatccaagcactcgggaggcagaggcaggcggatttctgagttcgaggccagcctggtctacaaagtgagttccaggacagccagggctatacagagaaaccctgtctcgaaaaaacaaaaaacaaacaaacaacaacaaaacaacaacaacaacaacaacaaagtcctgccttctagatgaactggaggggcttcacgcagcttcactcgtaaaagcttaagttttatgtgtcgtctgtattctttccatgggcttctgttccatggtgtttaagtgattaatggagaccattgtgtggtgcgcgttaaaatgttgtcatcctgtcatccttttcttgactagtttgccccaagagtactgtggacctctggtaataaaaagcaaagtcacgctttcagtctcaatattaataacttgctgcagaagcagagatgtcacacatctgcaagcaaagcctcctgtttcctacccttgctccttagaatggctgttagcacctatggtaaagctggctgaaaccctttctgttttgttttagaggagacgcttcactgtctgcctttgtgtgttggggatcaaagccaggccctgacaattgctaggagagccacaccctcagccctgatttcttgtttgtttctaatgaatctagttcattttaaatgcatcattcttgtgccaagatgacactctaattttgttctttacatcgtcccttctgtgagatagatacatcactattccagtttggtcctcagtgagaacactccaagacgcagcttgcctcagatgattgcacaagaggtggcacggcagggttgggattcaaaccatggactgtttgtctccataaccagccctcttaaccactgtacaccttgattgaaatcccgtaacttttcattaaatggtttgaaagggttggaataaacataaaagtggtaaagatgctctacatgcatttcagagatttttgtggacattgaagaattttaaactgaacccttaggccaggcagccggggtagcatctaatgccaccccacatgagtctgatgaaatggggtttctagggctcagtttactcacacagatccgtcctacccgcccagtgtgagttactcctgtctgcagttttgtgggattttaaaggaaaaaggtattgtactcaattaaaaataccatcatttttgttttccgtctgttcgtttgaagtaccttccttcagatccagcaggtggtcaaaaactgcagtgctagcatagagcattgtctctctgagcagaatgagccacccttgcttgcccggggcatgggggcctggacgcttctgcagttctcttctggcttctgttagcacctgggtctggactgcctgctctgggcagcaataagttcaccatttaccttagctactgttacgcactgtgtgtgtgtcaggatcacacagctctgttattctcaaaaagggactcgacgcggtcatccagatggaggtcagcatagagtgcttgcctagcccagacaaggcccctggctcagtctccagcactggaagcaaacagcggagcaaccacccctgctccctcaatctgctgctctaaccaacatcccctgagagcacgagtctgtggcgtgcacccacatccaggctgcagactggcctgcacaggaaggtgactgctgtgtgcagctgccaacctagttagcagagcggtcagtccgggtggggggatcatcagcctcctaggctgaggagcagataaaacaacaaaaatgtgctctgtttttcttaaaaaccaaacatcactcatcttttgccatcctgtacacagcagccaattggtgtccttgccactgaggggttgttctttttccagatccttcctgggcgtcagtaaataggggaactttcatatgtgacgaatgttgcagtgtccatcggagcctggggcgccatatctcccaagtgaggcatcttaaacacacagcatggcctccaaccctgctccaggtaaaccataggaagagttctcataattggaaaattatattttagtgattgttgcttaacaactaaaatactgcctactatacatcttaaatcttataaaagtttactctctatgtatagtataaagtgctgccctgtgttgaagtcattgtctgtcctttctttgtttacctaacataattgtgttccccacattcagttatacatagacagatatatcaatagattgtgtcgataaaagcttaaattctctagtgcgttttcattggtggctttctagagagattatcaccagaaattgttgtgttgtgctgtgttgtgttgtgttttgttttgaaacagagtctcgctatatagccctagctggccttgaactcacagacaatccacctgcctctgctaagtactaggattaaaggtaattgcaaccgtgcccaacttcagaaatcattttatttttttagatgtatttcatatatatgtctgtgtgtgtgtgtgtgtgtgtgtttgtgtgtgtgtgtatgcctgtgtgtgtgcatgtgtgtgtgtgtctgtgtgtgtttgtgtgtatgtttgtgtgtgtgtatgcctgtgtatgtgtctgtgtgtgtctgtgtgtgtttgtgtgtgtgtgtatgcctgtgtgtgtctgtgtgtgtttgtgtgtgtgctcacagaggccagaagagggcactggatttcctgacactggaattacagagcgttgtgaaccacaccggtgctgggactcaaatccgggtcttctaccagagcagcaagtgtttggtttaacactgagccatctctgcagcactcagacattttttaaagtctttctttcctataaattgtaatagatgatccagaaaattttcattaacaggcaaatttctgagtacctgcctatatttttagaacttttttttttcctgctttgatagcagcatagactgggattccgcagaaattgcttcaacatttgaagtttttaaaaagctcttgctgttaggcagagacttgagtgagcgtgttttgatcgcatgcctaacacttgtcaggggtctttgtcttatttgggatctgatgtcatgttcccggtacttctgtttgcgatacacagtcttcatgtctcctggaactcagggattaatcctgtgttttgcgatatttgtcttaatacacatcttactaaagctgtaacagctgcacagcagtacttaaactcccacaaacgaagggaccagagcaagtggttcgggttactgatgagaagccctgagagctgcactagcagccgggtagctctaggagtcctgattggaaaggaagttgagagagatttattaaaagttctacttaggggctgaagagatggctcagcctttaaatgctagctaacaaccataaatccccgagttctgttagaagtgttcaaaggccccttctcgtgaaagggttagctagcgccctccaccacattgtgagttctgttagaagtgtccaaaggccccttctcgtgaaagggtagctagcaccctccaccacattgtgagttctgttagaagtgtccaaaggccccttctcgtgaaagggtagctagcaccctccaccacactgtgagttctgttagaagtgtccaaaggccccttctcgtaaaagggttggctagcgccttccaccacactgtgtttgtttacagctttagaatttacagatggtccagagatgaatgattgaaaatgttagcagggcgtggtggcacacgcctttaatcccagcactcgggatgcagaggcggcggatttctgagttcgaggccaacctggtctgcagtgagttccaggacagccagggctacacagagaaaccctgtctcaaaacaaacaaacaaacaaaaaaaaaaccaaaaaacaaaaaaaaagaaaatgctagggttgactttaaggcagcagactctgaaatgtgtgtgtgtgtgtgggggggtcaggaccacagtggggtgtgagagagcttagcacgcagacgtgtgcttatagcattactttaatcatgtacaaagaaagtaacataattattaacaagatattttaaataggtgaatttaatgaaaagcattgagtgagtggtgtacacaatggtaaacggcgtgtgttcaggcaggtgtgtgccaaggagccgggattgggctatcctacacacaaagctggctcccatgtggagctccaaggtctcactgccagtcaggaacagtgacggcccggtccccagtctcactgtgcagtcagacgcagtggcgggaggtccccagatatggagtgtttttagtgcagcactgttttttcatttttgttactggttgtttttgactatttgtgggataaaatgtcctctcctactccttgttttcagatggttgagaccttgtacaacaatggtgctaactctatatgggaacactctctgctggaccctgcctctatcatgagtgggaggcggaaagctaacccacaggacaaagttcagtgagtggagtggttataacttctatttcttctcagcaagtggccctgtggaaaggagtgtggctattttgatcagcctccaaaggggctgtgggctatgcctgggcatttgctgtgaggaaggcagggggagggaggcagggggaccataactttggatgctcacccaattgaagttagtgatttctccagttggagtccagggcttggagcttgactccgggtgatgaggtagatgaaaccgagcgctctgtctgctggccgcagcgttctggcagtgccgggcctgtgacacagggttagatgctgcttcctcagggtgcccagttgagaaaggtaaagggaagagaggcgctgggaagttcaggcgttctcttatcagctcaggcctttgactctgctgcagtggagtccagctttgcccttcttactgtccagtgggggggggggggtgtcacttcctcttcttacagcacaaagaatgagaaatgtgtcagagctgttaagtgaactgtgttcttatttgtttccaaaccagccccaataaagcagaattcatcagagccaagtatcagatgttagcgttcgtccaccgattgccctgccgcgaggacgacagcgtgacggccaaagatctcagtaaggtgggcgcgctctgccttctgtggggccgtgagatgggccgcttcccttaaagccatgtcaggaggaagaagcagccttttgcaagtgcctttgactaactgacctttctcccttacacagcattcactcctctcagacacactggacaaaaggaaaacatgcttctaagaaactgtatttttttccccttttattttcattttcatttaattgattaattaatttgtactttttcggtacagttttcacatagattttgataagttctttacttgagaataatagccatttcaaagaaggttttctagagaacctagcatctgaaatagagcagaggaaggaggctgactgcttcagatgtccaggttcaaggctggagggcaaagtgcacctagagctgtagcacagccgtgtctgttacaccgagagcggtgccttcttgtgggccttggctgtttctacgagatgccgtaaaaatgcacatcacagttttttgagcggtgctttgaactagatgctcactcaagacagcgtgtgcacaattcagaatactaattctgcacagatgtaagtgattttcctagtgagtaaatagtttcctttttttaccaaataaaaaacatggccaggtgtggtggcacacatctttttttagtccccggtattcaggaggcagagacaggcagacagctgtgaattcaaggccagcttggtctatatagtgagttccaggtcagcctgggctacagtgagtccttgtgtaaagggtgtgtgtgtaaaaataagaagaagaataaaaagaagaagagagcgatgacttgggctggagaggtggatcagtgattgagcacacactgttcctgcagatggctcatgagatgactcacggcacatctaacgccagctccggggacctgacacccccttctggcctctgttggcacctgcactcagtgtacattgatgtacgcatacatacaattaaaaataaaattaaaaaaaaaaaacaaagactggttccgtaggactcatctgccctgtgagccagtcaggacagttgtagagtagccctgaaggagagagccatttgttctttgggagtttaaaagcgtttctgtgatgatacggatttagtgtgcacaggcccacttcccactgagcgcagcctggcagaatcgctgtgtggacaaacagcacagacttgagcaggtggccagcgtgtgccgcgggtggctggagccgctgggatccgcgctgtggcagcagctgaagactgatagatgctgtggcagcagctgagttttgaattatttcctgtctccttcagtacacaccataaccctcctggtagagggcaccgtagcacccaggttcctctgctcagagattttctcagaacacacagctggagggaggtagaccttgaaatccaaccacacacacacacacacacacacacacacacacacaccacctcctggtcaagtgcttcttgctgggtttatggttgtacctcttactggcaagtcctgcgtctgggcagattggccttggcagtccaagctccttgttgttaaactgacagacccacctgcagcctgaagccattgtaaacagcaaagaccccaccaacccacccacccacccatcccagccatcttcctgagccaaacaagacccgttactggtgtaaagtgtgttagagtgcgcggccagcagctcgggcacatctctcctgacacttctgacaagtactctgtttctgtttgtttttcagcaactccattcaagtgtgagaacagggaatcttgagacctgtctgagactgttgtctttaggagcccaagccaacttctttcatcctgtacgaaaatgtcaattattcagatattaaacggaagctgagttatgtttggatagtccaggtctgctcagtttgttctttttgtctacttcttattaataattcttaggaaaaaggaagcactccactccacgtcgcctccaaagcaggacagatcttacaggctgaattgctggccgtgtatggagctgacccaggcacacaagattctagtgggaagactcctgttgactatgcaaggtgagaggctgaggttctcactgcactgcgtgctgaacgtttctttttttccttgctaagcgactactctgggtatggcttgtgtttagcccctttaaagacttccattctattattttgttgatgaagatgtttcaaatgtgtgtcagctgagacagacaagatgaaaggactgccgagtcctagctggtgtggttaacacccggtcatcatagcacagtggttttcaggttatagcatacagatcagggatcaggaactgggagggggtggctagagagtgggctcagtggttcagattgccatctgctctgcagagaactggggttcagggttcagtttccagaaccacggtgcctcatctgtacctccaatttcaggagatccagcactctcttctgacctccaagggcaccaggcacacacacggtacacttatgagcagacaacattgtatacgtaaaagtcaatacatcttaatttttaaaattaaataattaaagaaggctagggaaatggcacactgagtggtgtgcttccctataagcatgaagaacagaactgggttggaaacggcacagggccgcagccctggcctgcctgctgtctgtgggcaaggttaagacaggcagatcttggacaagcctgttactgtgttctcctaagtatctggagctgcatgaggggacttcatggggcctaatcaatgttaaaacctgcagatttaactgatgaaagatggatagctttccttgttttccctgttattttattaactatgaaggatcacattctgtcataaagaatgcaatgggaaatgacaaaagtctgtcctagagtcctagaacttacttctctggaagagatgattaataaattcttgaaaagtttgaggcaagattatatatgatttgttgtcaaaatggacagccatgttttgttttgttttcctttggaagactgcgtgactctgtaactcaggccggccttgaattcagaacagtcttcctgctgtgctgcctgccctccccgtgctctgatcacacgtgtgaactaccatgcatggctgacagtgggtcttaaaaagcacatgtgcttcagtcgagaaaagccccgctgccttaagaaccttcgtgtggtcctcagagtccacaggaggagccaggtgtgggctcccacatctgtaagcccagctggatgagaggcagagaggggagtcataaagtgtgaagcagctctcatggcctgtgcagaccctgctgccatcaggatggacagcaaaagcccactccagaagtcgtctcccgagccacacacatgccatgatacacactcacagtcacacacataatcccttttaaagggcatctgttaggggcagtggggacttgctgtgcaaacatgaagatcagagtttagatcctcaaaacacacaaatgccgtagaggagtgggggtctactctgttccaatcataggaggcagagacagaggatggccatagctagctgacgagcaagactgctgtaccatcagattctagttcagtcaagaccctgcctcagtgatgggtagagagagattgctgacgtaagccttgagtctccatagacgtgtacacacacacacacacacacacacacacacacacacacacgtgcagaaaatgaacatgtgtcaggtggtttccttgtggtggccccagtgaatccattacttgagatggtctttgaggagctggttgaatatggacctgtgaaggaggagctaaagtatcctccagagagggaaggtggagtgttcatccccgtggcgatgggccaggagacgagcagcgcttcatcagcactgaggtcccaccatgctgcttcatttcaccccctgagagagagagctctgccaggtgcacggacgcaggctgagacgctgtctggtggacatgtgtgtgtgtcattggtcaggaagaattgtgtggagagagaacctggctaaagctagattgatgtttggagataagcagaatgcctccacttccttgagcactttgcatggaatagcctgtctgagtcacaatgtctcagcgtcagagtttacttctacactgaaggacccaggcagcttggctgagagttaagaaaggcagccctgtttcctgttgatgcagaggcaggagtagccgctggggagtagccgcggggacaagctctgcagtgggtcagtctgcctgaagcccttcagtgattttggatttctggactgatatgaggccagctgaccgcgtgcatcaggatcatgtgaaggaagggcttctccagggtgttgacgcctggggccgtcctgtcctgactgacccagaattcccaagggtctgtattctgggaacactccagctagctgttgagaacctcttccatcacctcgttaagtgaagtcagtttttgcccctctcctaagtttttaagtgcataaaatgcactctcctatgccataaggaaagaaactatcttgggtgggagccccagcttccagagggactgaaagtgatggtgatagtccgccatgcacagtattccagacagccgtgtttgataagctgctcaggtatctcagaacgctttgttcgctctgacctggctggtggatggtgagctgtgtcaatggtgctttgttctcttggtaggcaaggagggcaccatgagttggcagaacgcctcatagaaatacagtacgagctgacggatagactggccttctacctctgcggccggaaaccaggtgagtgagaggagagcagccttgctcgcctcttatctggagtgacaagttaggaccgcattgctacttggaaagacagaaagagaagatgattatcagtagggtttgtatttgggcagacagtgtaatggcagagttttttttttctttttaatatatattatttattgttatttctatgattgcacgtagctgtcttcagacacacaccagaagagtgcatcagatcccattacagatggttgtgagccaccatgtggttgctgggatttgaactcaggacctctggaagaacagttggtgctcctaaccactgagccatctctccagcccaacagcagagtttttatgtttgcatttgttttgcatttgctatcatctcatgatgtatctcagctttgcctgcaactttctgtgtaccttcaggtggttttaattttttttacaattttttttgagatactgtaattacatcatttcccccccacccttttcccctccaaaccctcctgcatactacacaccatgcagtagaagcgcagagctagagccttcatcactagaagagtgctgagaacaggctcggccttgttcactctctcttcgcctcacgaagtgagattaatctttatccctctcataagtctggaaatctgtaagtatcccacactaataatggaaagagggccattcaggtgtgacaccacctacaaagcgggactctacagtatttcggaacatttggttttataagctgctcagctgtctcagagcggcttgtcagagtgaggtggccctttacctggcctggtttgtggatctggaacaggagtcagtaaactgtagtctgagcacaatccagccctcgaccagtttcattaaataacatgttgctgaaaggtgaccacgcctgctgctatgtgtgtgtggctgtggctgctgccacagaacagaagtggagctgagtgcaatgcacagaatagcagataaacacaaagcctaaagcattgtctctacagccctatgcagagacattgccaaccccatttaaaaaacacgtctgtggaggagcacatactgtgggatgtgtgtgcacgcacacacgtgtatatgtgtatgatcacacacagggcagagttcaacgtgcaggagttctctcttaccgtgtggtttctggggaatcacacttaggttgtcagaagtggccgtgagtacttgtaatcctgagccacctcgttcctgtgtgcagattcctttctctgattgtgcagtagcattaggagtcatttgggggcaaggtggagcaagcatatgctagcccatctctccttctgaatggaactaaaaactatggacaaaatgcttagctttgaaaagcaattcttagctaagaataacaagacccaaagtcccatcaagcttgtagcatcttccttctttggatgcagtgacggcctgtgatatggagctgcaggtacaaagaggccttctctttctgatttcagaaatgagacctaaagcagacagacaagaagaaggttcctctgggttgttattttattttccctctctttctaaagggaatatgtgtgggtagccacagcaatggcacagatgtataaatgtctggcaccagcatgaaagaatatggattgtgtttctcttgctgcctgcttagtaggcaaatcccagcctgccctgttgcctgctaaaaacagaaataacacttgacatagatgttgaagaagcccagagtcttgcaatacaatgtttagaatatcccagattccgtccatagtgactcaggagagaaaaagctgggaaaaccaagggctgcatagagaaagcaggcactaggtgaacaggcgctaggcctggggccagatggtggtcagcaggtaaagagaatgggccacccagtgacctgagtgatcctgtgacgcacaggatagagagccagcttccatgagttgtcctgttggaattgtcagaagcattttaaccagctaataagagcgtggactgaagagcaatgaacattctttcaaaagaaaaaaaaagcacataagacagaataacctagtaaggatgttagaaatgaaaattacagtggggcagtggtgatatacagctttaattatggaggcagaggcagaccctgagttcgaggccaacctggtctatgacagccagagctacatagagaccatatgtcgaaaaaccaaaatataaaataaattacagtacttaaaatattaactctagattaataggtttaatagaaggctagaaatattcaaaacataaattgaaaataggcggctaggaagtgatgtagctcatggtagagtggttagctggcatgtggaaggcccagtccccagcacaagagaaagagccagtggcagcctgcctccgggcctgtggggaagcactagaagaatgaggcaggcacgctgcagggataaaggacttgctctgcaagcctaagacctgtgcttgttccagcatccatataagaaaccaggtgagccgggcatggtggcgcatgcctttaatcccagcacttgggaggcagaggcaggcggatttctgagttcgaggccagcctggtctacaaagtgagttccaggacagccagggctacacagagaaaccctgtctcgaaaaacaaaaaacaaacaaacaaaaaaaaccaggtgggacacatgcctgtaagttccaccactgggaaagcagagacactgggatcactggggcttgctggccagtgagtctcaccagtcaaccagtcccaggtaagaggccctgtctcagaaagcagtgttggtatatatatctgggttaaacagcaattaatgataaaaagaggctatgaatttgaaagagcaaggagggatgtctgagggcttgccagggagaaagaaatgaaaaatgatgtaattataatctcaaaattaatttttttaaagcagtggaagtgagtttcctacctttagatctcagcacttggaagcagaggcagaagggcagagggtagagggactggagagctggctcagcagtgaagggcactggatgcctgtgtagaagatctagggttggttttcctctcccacacggtggctcacaaccatctgtaactcaagttctaggagattcgaagccctcttctgccttccgcagccaccaactacaattggtgcttgcatgtatgtgcaggcaaaacatagatgtgcacataatagaatgcatactttatgaaaataagagtaacggtagaaaggggactcgttctgatgcggaatctgaagcacctggtgcttctcagaagtcactgagaggaaaaggaaattaaatggaatttaatttaaattaaaagaatgataagaaaaaaaagaaaagagttgctggcccagggctccatatccagcaaagcctttttagcatgaagacaaattaaacacattgctaaatgaggaaaatgataagacttcattgctctagcagcagaagtagagaaggttcctcaggtcagcgtgggcctgaggacagcgcagaaggatggaagagcagcccagcaagaagtgcatggaagcagagcagcccgggctgcaggcgtgtggccgctgacagcagaggctctcgtgtgggtgcacagaagactcagtgtgcagggcagtgcagaggaaggggaaagagtgggcagagcaggacagtgacctttctaagtagtcaaggtatgcgtagttcctgtaacccatagccattgaaagacagagacaacaatgtgagatcaaaaaacctagagataaaaacgaaacaaaacgcattgtgaagcagtacttaaataatcgaaagctctttattgaaaatattcaaaaacagaacaaaaagggaaaaagcctgacacttaaacagaaaatagtaaaatgtcataaatgccaaacacataaatccaaaactgtgtttgcagtaactgttaatgtctaaagagacatttaaagcagtggtgtcgttacagagcaaaagctgcgctgtacagtatgcgcaagtctataccacgacgaggtcagcaccaaacgatgtccatgcagacatcgaggctagcatggctgtgatggcatcaggatgtggctgtggctgcaccaccctgaatgaagcagatgtgacctgcctgggtcagagcagacctcagcaaagacagagagggtggagagacagtgacaaagtgcctgcataggcactggcagcactccaggtcacataccccggtgtccacagacccaaaggcgagcctccaaggaggcggcaggcagagacacctgccaccctgagttccagcctcaggtcccacctggtggaaggggaggactgactcttgatgtcttccaccctgcacgtgcatgccttgacgcacatgcgtccacatgcatccgcatgcacaaagtacatgaaccctgcctggggagctgaaaggaaggtgagaatgcagtacttaaacgcagactccacacacggctctgtaagttcaccttcagcaaggtgagccatgttctgaatgataaaccttagcaactccaaagaatttaaacttcctcaaagtttattctctgactaataaaactaagctagaaatttatgaaaatcaaaattttcaatcacctagaagcttagcaacacatttttaagtcatccatgggtctcaaaagaaaatctcaagggaaattagtgtcatacatattatgtatctggggctggatagttgttttgaaaggatagcatgtggtagcccaagctagcctcagacttaccacagtccttcctcagtcttccaagtgctggaattacatgtgtgtattaccatgcctggatcaaaggtattttcaactaaatgaaaatgaaaatacagtatcaaaagctgcagtattaactaggcctggtggtacataccatcaatcccatcacttgggatgcctgtgaattcagagccagtctagtgcacatagtgtgtgccaggccaaccagggctacatagtgagaccgtctcagaaacagaaaggggatgggggaaactttatggagtttatttaacacagtcttttgcaggaagtttatagcattaaatacttggatatgaaaaaagtataactctcaaatcaatcttcagtagaaacaatgcgaagataataatacaaccatgtttaaagatgtatttatttcatgtatgagtgctctttctgtacgtacacccacatgccagaaaagggcatcagatcccattacagatggttgtgagccaccatttggttgctagaaattgaactcaggacctctggaagagcaactagtgctcttaaccactgagtcatctttccagccccatatatgagtttatatgtatattcctttgcatacttaaacacacttcctccccagccctgtaaaattgtatttttcaagaatttcaatttgtacctcaacacatcccattaatgaaaatgtcaggttcaagaaataggaagaagggctagagagatggctcagcagttaagagcactgactgctcttccagaggacctgggttcaattctcagcaaccacatggcagattacagctgtgtgtaactccagttccaggagacagacaccctcacacagacatgcatgcagacagaacaccaatgctcatgaaataaaaatgaataaattaaaaaaaataggaagaggggctggagagatggcttagcaccagcatccacatggcagccagtttctgaggagtatgcctgcttttctgccctctgtgggggcatcaggcacataagagtgcacagatgtgtacaagcaaaagacaacaaaataaatctcttcaggagagagaataagaacagagagagtgctgtggttttgtgtaagtgggttagtggggtaccaaacccagcaagagggaagaggaaaggtgggtatgggggggttccccatacacagaaaagtcctcagcgaacagtaaatccagcaatatgtaaaatggagaaatgcgccataaccagtggaacacaactaactgaagtcagtcactgtgactggggcgaaggcgcgggcgtcagagacctgctgctctcacagaggacccaggttcagttcccagcacccacaagttggctcacagccatctgtaattccagtttcaggggatgtggcaccatcttgggcaccaggtacatatgtggtccgcatacatacaggcaaacactcatatacataaactttttaaaaatttttaaaagaaaatcagttaatgtagttcagggcattagtgaactaaaaggcagcatactcagataataatttcaagaagataattacaaacgctaaagctataaactaaggaggggctgtgatcttggaataagttcttagatacgtgttgttagattaattctgtttctgtttctgtgagcagctcactcgcctataccctgctgacttcagactcatgctgccctctttgccccacccgcaagtcctggattagaggtgtgcagcatcaccccagcttcagaaccccaagctcctgctctaaagaactgaccaggttggaaagagaagtagggaggaagtatttgcctttaatctcagcacttgggaggcagagccaggaggaccaggacagccagagctacacagagaaacctgtctaaacaggatggtgtgtggggtctgaggagctggcttggtagtccagagcatttgctgctctcggagaggacctggattctgttcccagcacccacatgctggctcaggactgcttacaactccagttcctagagagccgttgcccttaggcctctgtgggcacaaagcacacatgtggtgtgcagacatacatgcagggaaaaccggcatatacataaacaaattttaagaagaagaaatgaaacaggatctcatgcaacctaggctggtctctaaagttgctgtgattgtagatgaccttgaccttagatcatccacctaagggctagggttattggtatgcaataccatgcctgtgcgtgtgtttacactcgaagtagcatagcatactcaagtcaattctctccattttcttgagcttgaatcttgtctctgcactgtactccagcctagctgacccatgacaggcagtctcctgtctccacttcccatctccccgagggagtgctgggatgcaggtgtttgccaccgcagctgactttagcagccggagggtttgcctattgagccgtctccaggctctggtacatttcctctgccctagagttcaagaccatctcaaaaaaaaaaaaaagcaaaacctgaacctgaagatggtaataaatagcaacaaaacagacaaacaggcaagtaacaataacacccgggcacacatccttccttcagaaacacacattaaaagcacacacactgtaatgctgcccagaaccaggagtatagcttgggagaggcatggaacaactgagtctcacactgttgtacacagaacactgggggcggtgggcagggctgcttttagtgtttgtgtcaggagacaaggtcttcctttgtagctcagtccctctacccgagcttccccagtgcagtgaactctgcgctctgcttgctgttcagaatatagaacagcagaggtgctgaagaaatggcagcttcctaccaagtaagatgcatgcgcgcgctcacaaacacacacacacacaccacacacacacacacacacacacacacacacacacacacacacggaccctgcgctcctactctcaggcattgcctcggagggtaaaccgattacacacagaaacccgaaaaggtgcttggagtggttttgtcattgggatggacatccgtattctgaaagctagggaaggacacagaactcagcagatggccaggccgggtccctccagagccgcacacagagcaggcctgctcagccctggctgccttcctctcccaggctcagggcagctctgccatctgccaccaggagctgacagtgacagagcttggactgagctcctcagcagtttttactgagcgatgcctggaacagggcgggtttcagggaactcgcagccaatctcgagacttttctgttgtcccacgtggcacatgtttatggaaaatggctaatgggaaaacttaaactggaaaaaaatggtgatttcaaggttgatgtgagcatatctggtttctgtttcagatcataaaagcggacagcactttctaattcctcagagggcagacaggtaaggaccagtttggtttatgtgcccactatcgccttggtctacagtattcaagtgcattgtatgttgtgtttaacagagctcatacatttttctcttttatggctactcactttggaaataagacggctgtaagtaaattaccgtgtgaaacttaacttggaaagagcccagagctcagttgcactgatgcagagtcgtagccagggatacctccactgtttgtccagttgtcctgctgttttgtgtttataggttatagtcacaggtgtttctgtgtcaggagacagtctgctttgcctttgacaggccctggtgcatttcacattaatctgtgggctatcagcatgtcacggctgctcagcatgggttacaggctggatgaatttgtacattttgagaaatgaatgttctttttccttctctactcaaaatgtttaaaaacataaaagccacccttagttcatgagctgagctaaaaagtccttagccgtgtccccagcctgtannnnnnnnnnnnnnnnnnnnttgtagctgtgagcttgtctttctgccttttctgtttcctctccgttttgtcttgacttttgttttcctttgtgccatggggggaatgcagtggctcacgcgttggacacaggctttcctactgagccacaccccgaggcctagagaggaactgaagaacggtagcttccaccaccctgcggtggggcagtttgctcttacctgactattgggtctctaagagtcctgaccaaagtgtctaagtcttcaatgactgcggctacagaatcgttccataagcagggctatctcctccctcgggtgtcttagtcttctagtgaggtcacggcagcttctgtgcacttgcttaatggttttgtgctttttcttagcagcctggatttgtctgagttggcaaaagctgcgaagaagaaacttcaatctgtgagtatctcttccctaggaaccccagtatggaacccttgttggtccctgttgtcagtcagagttacctattgcatcatagtagctaaattagacacatgctgtctggtctgaatgcagtaaccaagaccaaaagcactttagtatatccaggcggctgactacttcaaacaacccgtgatcttttctgttaaaaatgcagcccttgcctgtgatggtagagaaccaaagttgtgggtgtgtcttggggtcctggggtgtgtggggcaccccttcttggcatttgttacgttactcacatgggataccgaggactaatagtagctgctggtagggcagtgagtctagacatccgtccactgcagtgctgtgactcctgcccatcaatcatatgccgttcctagagcttggtaaatttatgctgcggagagcttgtggcctggacccattgtgtgtgctcagggtttacccagccctgcaggtcacaagatcactttactctttgtcttcccggcaagaggccctttgtctgtctttcccatgatgcctcaccaggtgcttcctgctcaccttgtgagatttcactccttacctgttctcagtggtccctgcatcagaaccaagagccttgacttctctctgtgacctttaaagacccttaggcaccagcttacttcccctctggttaggtgtacgtgcattgttggagcagctctgtgaatcagctctcttgagggcaaaagccactgccttggagccctgcttcaggacgtgtgcctgcatgtttgccttgtctggttctggctcctcttagacttagaacttggtgcttccatgtgtgagcaaagcccggtttcctgccctgtggtttccctccttccctttcacagagatttttagagcctcatacgatatcactatcacataaagtggacttatccttcctagtacttaattatactgtgaaataaatgttttatgcaatttgtttggtgtctctgtgttctgtatctatagttgtgtgtttgagtgtattatgcctttcttaaggaagccacctagtagataaataagatgtcacgctttcgaggcagcgcaagagtgtgtgctttccttgtccttactgtagtttgtaagcaaacttgtacctggcatcagactcctccttgctctgtctgttggctgggctggataccacatgaagcctgaggttatggggtgggcattaaatacataccttgggtatagtttcctatgcccttaagaccttgggctgtctgtgtgtcaggcttgcccagctcacggcagcccccaaagcacagccttccaagaggagcgctgggaaggggacactgtcgggcatccctgttgggcatcccggccctcctccgggtaggtgttgctcttagcagcgcagggcagcactcaaacccccactccacccttttccatccttctctttcttcctccttcccttcctgagtctgtctcatactctctccttcctccctagtgaaaaactgagagaaatataacagaaaaaaaaaaaaaaacaatgtattcttgggttatgaaaatgtctgttcctcgatgtccttgtctgtaaagtaagacagtagtgaactctgtcctgtcctcgctgctggctttggatggtgtccttagcactgtgtctaagatgccactggccctgagcagttctgccatgtggccacgagtgacaacaaaacagctttcaatccaaacccctgcagggtcctcagtgagcgccttctgtggggtttattttgaatgatcagttaatccgagggcactagggaacttaaagaaagatgggaccatcctcagtcacctcgctctctgccagcgcatgctcagcgcttggcatatcccctcagcctttatttcctacgcataccatttttttctttctcgaaactgtagtagcagaatttcatactctgcttttttacacggggcacgaggcagtcagtaaagacacaggatgcaaagcaataaagaggccatagtcctcgagttgcaggatgacagaggagccagaccccaaggctggggcttcagcctgcctccgtggggagacctggatagtcctccagttcctggctgctgtatgaaagtttggtctgtggggctgtgctatgaactgcaccccaagcggcactggggtggggtggcggccacgctgtgctttgcttgataggaagcctctctgcgacgcgtgttgttacacagtggcacccttccccaccccagcagtgcagccatccaatccatagccttgcacaacctgggcagacatcctgacgctgagccccgtcgccatccccttcctgttgtagagcagacataagttctccggacagcagacttctggggtgctggctgacacagggagcaggggggacttgtgtatgagagggtttgtaacaagttactcttgccttctttgtgacagtagcctgtgtgtcaaagagcagggcctgagaaatgctgttctagagctggctttgagtaggaacacccccacccccaccccacccgcccggagatgaagggtgaggccggcacaggcatgctcccatgttaactgctgtccctgtgtccctgatgtgtttattttcagctgagtaatcatttgtttgaagaacttgccatggatgtgtacgacgaagttgacaggcgagagactgacgcaggtgacgtagcatgcggcctacctactcccggtgggcggcggccagctgctggcctgggtttcttcttgtccagatgcccctgtcctcatagcccatgtgcagagacgtgctttcgcgcgcgttggcttccaagtgggcttccccgggtctcccgcccggtgcatgagccgtgccaccgcgggggtgctgagattctctctcggctcctttcttccggctagtctggcttgccacgcagaaccacagtaccttggtaaccgagacgaccgtcgtccctttccttccggtcaaccctgagtactcctccacacgaaaccaggcaagtggctctgtatgaagagttactaatagtattatttggggagtgactgatggcgtgatatttggtgtccttgtggacatacacggaaacagacggtgtgagaattggtaagagaagtacaaacgacacacaaacgtgaggagaaaggataaaagatcgtaaaggagactccaagttgtcggggagcatgggggtcccatgccactgcctagcttgtgggtggcttgttggcttctggtggggtcctgttgctcaggaagctggaacagggggacctcaagctggcagctagcctgggctacataccagggccatgacagagatggtggagagaacgaaatggggtaatttgttttccagttgatccaaagcctcagatgtacaaaggagtcctcagttaaggctatttccaataaaatcaaagcagacacatacatgtggtttccacccttgtgctgtctataaccacagaacactgaagggagcctcagcctctgacaggagggagagaaggaggagaggggttggtgctgaataatggctgactgtaagagcagacccactttatccctaaagtcagagatgtccctccagattcacttctcacgcactgcaaattaaatcactggtactagaagttttctattctggtagctctgaagatcaaagtcagggcctgatccttgcttgtcaattgtcccagcagtgagctatacagccagaaccattttataattcattacagtaatctctgctgtagaaatggagatgttaagtcctctgccacaggaaatattagtgttgactagagagtgatggtggctgagattccatgattgagctgggagacccttgcgtcagctgcagtcctgggcactcgttgtcgcccttcgcgcttacattcttacactgggtaatatttcccattctcttctctcccttagggcagacagaaattagctcggtttaacgcccacgagtttgctacgctggtcatcgacatcctcagtgatgccaagaggagacaacagggcagtcctctgtccaggtcaaaaggcaagtgtccagcccagccccagccgagagcacctgggccttctgggatgcactgtggagtcccgagctggaggtgatggggcagtcataagaacagccatcctgagagtctcctcactaatagactatgacagagaagtacctgttggaaccctgaagaataaggcgtacctcaaagttactacgtataattcacatttattttatatgtattttttcataatcacttattttccccaaaaattggcatgttgaaattaacccaaaagcctaactcttaaatttattaaggacataaagtgaggcgatggagactcttgatggcagctgtcacttaactcagaacccctgcctctgaataagtactgtttactgctataattttaaatgtctgtagcgagaagccttgggatgtccgctgagcatctatttcagaatggctcttacaggccctatctccagacgtagggcccgcttcctcctagccagcccttaagtttgttcttgttttttttatagatacaggaactatgcctttttattttgaggtacttgaacaagatgtttgtaccataaaaattaaggttcctgtcaatatcacactcccctaaggcaggaattattaagtaacagtaatttatgtttcttcttgattgttgaggaatttggtcctatcaatccagccagcagtaaagatgctctgagaagtggcattaaattggtgaggttgcagtctggagaggttttgtataaacttgaaacctcaaaatatgcccactctaaaagagaaataatgagagattccatattgtgtataatgtcaaaaacattagaaacaactaaataataaattctagagaaacagtcacatgattaatgtacagacatctcctggaaatacttcatggtgtggagtaaaacaatacagtctttaaaggtttgctatagtctctgttttgtaaggtgtgtgtattaatataagtaactgtacagggaaaggtgccttccccagatgaatatgcacatgtggttgctcctcgacagcagatttgatgcttgtctggatgtctggctgaggctgaggctggtaccctcctgcaggtttcagtttcataccctgtcactggcctcgcgtagactgctcagtgccatgtttgcctgtgttctcatactttttgttggtgatttcactgctctaacaaaggctctgagcacaatgggaagatgttgaacagtgtgcctgcatgcaagagggctaaggagaggttcgtgggaagctgtgtgtgcacagtgagcatcttcctggtgtgaatggagtggcctcagactgtggtcatgaatccacggtatgtgtcacacagggtgtccttaaacagaagcgtgtgtggactggctcatgataaggctgtgactggcggctctcaggaactgtagtcctttgtctcagtgagtgacaagcttttagcctgtattcactgaggacaagcctgtatgtgtgcatatatgcttagaacagtaactagaagaagcaggccagcgtgtctcagcctgggtgatcgccactgtccctcacgagtggttacagcctctgtattcagtctttgtaccgtatctctgtattggcatgctggtgggttttgttttgtttgttttggtttttgttttttttttttaagacagggtttctctgtatatctctggctgtcctggaactcactctgtagatcaggctggccttgaactcagaaatccacctgcctctgcctcccaagtgctgggattaaaggcgtgcgccgccaccacccggccatgctggtgaatcttaaagattcattgtaaaagttaaaataggaccgctatatcttaagaaatcagaattcactgtccagatgaagctgtctgtaaaacatctttggaaattggagcttaacttgagttgcctcaaataaaccaaaaatgtttggggatttctgaacacttattctaaatgtgcaagagtgtgtaagtcactgctccccgtctgtggaatggacactactgataatgtagacacgtgtgtgtctacttggtccagtgtccccttgtctgtctcacagcctggatgtatatgagtgaccactgctgttcttgtctttgcacctgacttctaggctgggtgttttctctctttttttttttttttttttttggattttttgagacagggtttctctgtgtagctctggccgtcctggaactcactgtgtagaccaggctggccttgaactcagaaatccacctgcctctgcctcctgagtgctgggattaaaggcgtgcgccaccactgcctggctcaccttatgttcttatggctgaagcagtgccctgtgcatgcaaacctgtgacttcccccctcagtctggcagccaccccaaggggtgtggctgagctctgtggtgagtgggaagcattggaactgctctgtgtgactgtcccttaagcctctgcgggcgttgctctttctgtcattttcttcaccctttaatggctaaaccagaaagtcaccttagtagttttttagaaggaaaaatatattttaactctgaagtagtttttctccttctgtgaacagacaatgtggagctcatattgagaacagtcagtacccagcacagcactgagagccaagacaacgaccagccagactatgacagtgtggcctccgatgaagacacagacgtggagacgagggcaagcaaggcaaaccggcagaaggtgagaggacacacctcccacaggacagacgtgctcctcctaaaatgtgttcttgccctggggctgtagctgaatggtggagtgctcgccagtatatacagggccctgagtttatttcccagtgccaccagaagacacatacacatggcagaaaaagtaaaactggcagaagggttaggccttggaaggtgctgtgagagggctcaagttaggctcactgctaactcaagccaagcaaagattaaataaatgctcttaaaataaggccctgtcactgagcaagtgaaggatcagcgttgactctaggctgaggtcaggactggaggcttctctgtgtcccagtgtgcttagctcctcccctcatgacctcactgatggggaagcaggggacaggagactatgcactgcacaggtggtgcgcatcgcaagagcagacaagctggaggttaggagtttggaagagagagcatcaagggaggagctcttgacagtacagggctctgaaacaaggcctcatagatgtgctgtcctgcacccgcgtagaaggcagaacaagaaagcctgggctggaacagcctagaagagccccacactgtgcagagactctggacagcacagtgaggacctcagctctaaagggcattgcagcacggcctcagggctcaggccagtggggcccagggagagagacagggcactgttgagtgaacaggggacagggccaaggggtctgcaggctgaaccctcaggacagactcagataggcactccacagacactgagtaacaaataaacaagaagctaggctgccgaggtctgcaggtttgaagcagggagataagcttagatttgtccagcatttgctgtttgatattggcagaagggacgcccctacctggactgccccgtgccagtccactcagttacaggcagggtcattaccagtccctcagggacggaccatccattgattggctgggctcctgctgccctttcagcctctcgctgagcactgctgctggactctcaggagccctggcctcctcaggcacgccttccagctcccccagctcctccccaggcagcccagccagctgctgcgtcccacccgctccattgtctgtgtccccagcactcagtccctctgtcctgccttggaacaccttagccatcccctttcctgtgctgctggagtgtgagcgccatggatgtagcagcctgtcctctctgtcacagcgcactggagactgactgatgctcactaggtcatgtggagcgagtgaatccatagagtaagctctttaagttagcaaggacagtgtgtgcagggcagcgcagagccttggcagccagtgtccacagaggtttgcagcgctctgcctgctcctgcaggaagctctgcagagtgtcatgagtcctggagtgcccctgcctttcatatggtccacctttgcagtccagcgggcgtggtggagatggacattctttagctgttagtctttaacatcatcatcgcggattgtgaacattttcccggtttatttttagagcctagattcagatttgtcagatggaccagtcactgtgcaggaatttatggaggtcaaaagcgccctagtggcttctgaggccaagagacagcagctaatgaaggtgaataacaacttgagtgacgagctgagaattatgcagaaaaaggtaacatgttaataaatgccaggatggttgactcgttgatcccggtcaccatgcttatggtcagagggaagaaaacatttactataacagacatagacatactgtcctcttgaaagcaggctgtgtgtgtatgtttgaaatgcagcgctctgatgagaaacgtgttcagtgtagcacagagactatagcccagtggtgggtggtgcatctgcctagcatgagcaaggcctgggccagggcctgtgcttggctgggattctaattcagtgtatgtatggacacaaagccttgggtttgcacctaaaaatgcattcagagtaaactcccctaggagagacctagcagcccactattggtgtgagatagcataactttgccctgtcctgggctttctgggaatctggaagctactgcttgggtgtgattttccacacctattgctgattcttaaaattaatctcaccatgcagacagagcaggcagaagcacgtgcttctcagcgtaagccctggcacgtaccatgtgccgtgctttctctgctggcactggctctgactgctaccctggcaaccctcgccagcatctcagcctgctgtcaccacctcgagcagggcttgacacacagaagactgccacatgtctgcctgtactaacaaggagaggcaacccgtgtacgctgcactatcctagtcattcccccagggcagccgttctcaacctttaggggacgtcaagcaatcctttcacaggggtcgcctaagtccattggaaaatgcagaattacagataggaagtagtaacgaaataattttatggttaggggtcagcacagcatgaggaactgtgttaaggggacacagcgtcaggaaggttgagaacccctgcttcagggactgggaactgcctgtaggagaggtcagtggggaaggcagtgcttgggatgatgatggagagcgacagatgggaaagccagctgtgccctagactctgggcaccgtaagcatcgctgactgtcgtgagaaaaagctcgctatgcaccccacgcagaaaaaaataggctggctttggggtttatactattgttgaggaacgcgatctcagactcagagtattgtaaggcctggtcacaaggtacatcttctcaaggaaagccaaagggctctcccactggctagggagcactcccactggctagggagcactcccactggctagggagcactcccacgggctagggagcactcccacgggctagggagcaaggttgtgagagctctgcagtcagtcagtggctcttgtgctgtagtgcagaggctgagagactgagctctcgtggcctagcgccccgacctgccttgcagccccttctaggctagtgcacagctgcgaccaagagcctgagaggcctctgccgcagcagaggcctgacatctcctcggccttttctgagcagggtcacacagatgtggtagttaatgcagtcaccatcttaccagcttcttgggtgatttgtttttctgaaacttgcctttgattgttggtctgcggggcttcacctttttacccatagttctcctttagtgttcataaaggttacatgtgctggggagatggcccaggtcaaacattgaaagacaagaagaggactgaagtccagacccccagagcccatgtgaaagaccagttgggcacagtggtccacctacagtgccgtgcagcaagagcagtgacagggagtccccagagcaagcttccagccagaccagctaacctgtgtgctcaggctcacagggagagtgattgtgggagataccagtgctccactcgagcctcccatcacatgtgtgtatgcacgtgtatgcttaagattaataaagaaaactcagtgttggctgaagagatggctcagcaggtaaaggaacttgacagctgcagaagctgacagcttgagttcaagtcccagagcccacagaaagccggagaagaagcctcagagttgtcctctgacaccacacgcagacaccaggcacatgcagacacagtcagacttcatttttattgtaattgctagagacagctcgaatctcttgaaagcaagtgtctagagtttctctagagcaagaattggggagagacttagtgggtaagagacgagtacccagcctgatggcctgagttcaagtccctagactccctgacctccacatgtgtaccgtggtgtgcactcaccctgacacacatgcacatacactcagacaagccaagtgttgacgagcagagccattgtccattattatcatacagatgcctgtgatttttaaactagtgaattatctgtaactttttatttcctgccatactttttccagagtacagcctggatcttttttttttttttttttttttttaaagatttatttattggttatatgtaagtacactgtagctgtctgtcttcagacactccagaagagggaggcagatctcattacggatggttgtgagccaccatgtggttgctgggatttgaactcgggacctttggaagagcagccgggtgctcttacccactgagccatctcaccagccccagcctggatcttataaacattattaaaatctgtcttaggacatttttataaatgcagagtaatgaatttggacacagccctgtaatcccagctactttggaggctgagatacaagaatcacaagttccttcttgggctaagaactagttcaaggcccgcctgagtaacttggactctgtctcagctcctgggcatgatgtaccagggggaggctctggtagaccatgtgcctctgtgcttgaggccctgggttaaattccgtgtgtaggggagaggctgaggcgactgaaaccagggtctgtgctcatctcagaaggcagctggccagagtccagactgggtgtttcagaggtagcatcagtgttcagggcgtttatactttcacagcctgctcagaatagcacagagagcttttagctcaggcagacatatgagccctgcatctagggatatagtttcttgtattattccctctctctggaccccacccagtttccattcatatcccgacagcccacacacttgtctgtcctggaatgcaagaatttctagaggctctccctctttgcaaaggaggttacatatataggcggggaagccatgcttgtgtagaggtaggcactacagatagagcatggggcttgttcacaaagcaagggtgtactgtttttattttaaagtttgtaatagagttggcaaagtagtgtgatttatatctgatctttcacatttaacatttgtttggaaacgatgcaaattaatgaagagggtcagccactagtgatgtatttcccacagattggtgctttctaaataaaacttgaaagttaactcccaatactgcatgaccttgctattggacagtgaggaccccctggtgcagacatggttgcttacggacttaaaccttggcactggatgacagcatggtcaaagtgtacgttctctcagagaaggcagttggactcataccatccccagcttatgctacacaaatgcggggctgaggcagcacagacacggtcacttgtatttaagatgccagcctcataattccttgctgatctctgatctcatgaagcagctcacgtgtgaaaattgcaaagaatactcagggtctctgtgtgtcagtgtctaaccaaagtgagctggcaccaggtagcccagcccactcaaggccagcatcactaactgcatgggtcaaaggagagcgaggtcaggtcacagccctgcagcaaaacactgatcaccaagggaagccagtggacctcgggagtgcccttctcgtgaggacactaacctagttcaagaggttgccggtttcttgtgatacgttaaattagcaaacttaccatggtttggtcccttatattttttttaaagatgtgcttgaattgtttagaatatcaaaaatgctacataataaagacatttttatcctaatttttcttgttggcgttttggaaagcaatgggtgctggaatttcccctgggctgacctcaccttttcttgctttgcactttgggctgcttccatggcatctcctgtcacttccccatttgcagatggctcagggccgtgtgaagagtcagagtcaatgttctgaatctcttcctcgagacagctttagaatgacccagagtactgctggtctgcacatgttttctggccccaccatgacaactctctaggcgggtagacttgaatttctcatgagcctgtaggttattccggaaggaggaggagttgtcatggcttcgccttgcagccccgctagctttatgtcctcacaaggtcgtgttacgttggtgtacttgactttgctttgtctgcctggtgtgcaaaaacacagacccactgccaaatgtttctttcagcttcaaactctccagagtgagaactcaagcctcaggagacaggccacagccagtgcctgtcaggtgcagactggctctgaccacaaggacactgcaagccactcgtccctaaagcgacggccatctgcccggggcagtagacccatgtccatgtacgagactggatcaggccagaagccatacctcccaatgggagaagccagccaccctgaggagagccggacgagacttcaacccttccccacgcatgtgagtagcactgctgtgtgtcccatttctgctgtgcagtctgactgtgtgttccctcctggtcaagccgggcttgaggactgaaggggcttggctaaagttgggcgttctggctctcgctcagcccctccccttcagttcctctgtttctatgatgtcattcccaggcagcctctgttggcatgtgttgtgtagagcttccttcctgagctctacaaacagaagccagttgtaaaggtcactggcagaagtgtctgtcttcatcataggcggaggctggggctggagacatggcccagtggtaaccacactggctgctgtcacagaggccacccaggcggcacatagcccactcccaaccagcttaactcttgctttaggggatttgacatttcctctggcctcccagggctctgcatgcacacggcacacagacaagcaggcagaacactcatacgtaaaatgatctttttaaaaacaacagagtaggcagaggcatgccctccttatgagctggaactcccctgtgactggatacatagagttgagagagtctgggcttcggcagcctggttactgacctcacctaggctagtagcatgacttggacatttcataaagatgcagtgtaagcagccattataccagcacactcaggaagctgaagcaggaggattgcctggaccacataagatcttatctccaaaaaaaggaaaaagaaggaaatatgtaaataattgaaaatgtccatctgcccacagtgtctgctctgtggtaggctctcgccgaccacagtggtgcacgtgttgggaagccaagttttcaaacattaaactagtctgtcatttggactgatctattgtaaagataccggtttccacagagtgctccaggcataaactgccttacgtagttcttccttcagagtgtggtattcatcctttggaatgtcaaaattatttcttcaaagtacatagagttcttcaataagcttcttagggtaatgtgaagcagatgataagatctaatacatttggagactttagcagtgtaagactgcagtaccgtatgtatccaggaatccattgtctcagcttctctttatgtgggtttaatgcttgaagaccggtcactgacctgactgatgttctcagtgaaaggagcctcgttttcatagagctgagaacaaaacttaggcaacctcaccttggtagcttacacagtgcacttgatcctagagggagtgggtgtgaggctgtggctgtaccgcccagtctgacctgaggaccagggtgatgtgcacacctgttcagagtcgtccatagcgctgtgtggttttgtccctcccaaccgagagcaagcagcactgtaggtgctaacagtgagtgccaagtgtagctacgatggcggtaggatctcttccttaagcacaagtggcctcttcagtgcagagtggtttccagcaggccacttgcctaattagggatcattgccacagctgtcaccgagctgagggacatgtgtgagctgtgcagtgggaggtggggacgtgtttgttttatgttttcccaagcgtgtttctctctccacttccagattgggaggagtgcacttgtgacctcctcttcgtctctgccctccttcccctccacactttcctggtccagggacgaaagcgcccgaagggttaagtacactctgactggtctgccctggaggagggccagcaccccttggctttgtgcccccgccccttcctaactgccctctgtcctgcatgaagcagctttgctcctgggttctcatagcagcaggcacatgcagccgtgcacatccggcctggagagagctggccttcctctgggcctccacgctgtgcgccttccacgctgcctctctcacctgtctaaccacctcccagatcacctagagcacatcttccgagcactgtcgtgttaagctaactgaacttgagctggctactggtcacagagagcagggcagtccacccagggtttttgagatacagttatgaaattaaaagtatatttgggttagcgcaaaagtatcttagcttttttcttctaactgctgacttactttttattagcaccattaccgctgacaagccccacctcagttggtactgtcatgcagaggagaggtggctacaggcttaaagctgtccacttggaatggtaggccggacccttctgctggtgtgtgactcacgccagtggactccctcacacccacctttaagaaaggcagctaaagggtgcaaaagatttaagtgacatcgtccctgttcccaaacagacattgtgtaagaagaaaactcttttcatgtgcacagagagcatgctgctttcctcttgtgggagactggggcaagccctagtgttagaggcctgcccttcggctcctagctcggtctgtctgtagcaagggtgaaaaaaagtagggaactgcaagcaagacaccaccttccccagcaagcccccgtgtggggaagaggaccctgtgcactgccaggaccctgtgcactgccggggccactggctcaccaggtcactctgagtttccttacagcccttgtgaagtcagaggacttcttgaagcttggcacttctggtgttctgagcagccctggaagggcactgtagtctttgttccaaatggtagttacggaagagcaaagaaataaggaaatcccgcagtttgataataatgatgttgagagtcaggtaggccggtcttatcatacaattttgtagtttttttgatttgtagtgtggtagctttgaaagggaccagtcactgaagtgattctgtcacagtgagcagtgacgtcatccagggtcctctgagctcctcctgggggctttgtcctggcttaggtttctggggtttgtctgtgcagagaagtaagagcagctacaaggtaacactcgtgttaacagctttaacactcctggctctgcatgctcactgtaacttccataaacttaaatgccggctcattgaagtgctgtgcactttgacggaggaggacttagtccgtcagtacttgtgcgctgtacttgaggagcgtttcctgaacgctgttagtggaggtgtgtcactcttctgagatcctcaaacagaccctggcacttctgatcactctgggtaatgtattcaatctccaactgtcaccgtgacatcaggggaggcagcagcatcccttagagagatacaggattccaggaggcaaaagattgcaaatttaagataaacctggcctacattagcaacactgtctcaaaacccaaaatgtaagctatggagggtgttagcactgtcttctagatttctctccccactggagcagtttcaatgaatgaactgtccagcataattaaaattcagtttgtgtgtgtgtgtgtgtgtgtgtgcgcgcgcgcgtgtatatgtctgaaatcagggtttttttgttttttttgtttttttaagtaaagattagtcagacattcctttacaggtaggaaaggtcttaggggggcagatttctgagctcaggaccaccagaccctgctctctgcccctgcacaaatactgtgtcccctctctctagtgtcagttacccgctgacttagccacagagcaggaagttacaaacttcttcgcttgataacctcataaagccgggcgtggtggcgcacgcctttaatcccctgctgggtgaagtgcagtgtgtggaaagggtcatggtggaacttaggaagccagccccagtgctcagtatcgtccatagagtgggaaagaggatgtccaggggacaatgtgagggccttgggaggagggggagcaaagcggagcaggtctcaagacgccactcctcagccggctgaaccccaggctcgtgcagactgccccaccgacttcctctagcagccatttttctggataaggctgcacatctcatgtgacttagcaaagcctctacagtcgcagcctttgccacctttccctgcatcagttaaactacctacccgtgtactttaataaccatggcttgaatgctggctacacggctggaaatagctaatcagtaatcagtttagattgctcatcggcttatgctgccatccaggtgagggattgtcacaccgtaagatgaacaacgagagaggtttcttcacacgctccagaccaggctcctccagaggatgccatccgcgccacaccccctcacactgacagaccccacctctagtgctgctgccagtcccgataaagctcattgtaacctccacagttagacctaatctctgtattttcagagatcaatattttggaaaacgagtaaagtggtttggaactaaggctcttccagggttaatccgtgtggttcacaggcagcagcatgggggctcacaggcagcaaggcttccttgagagctcatgaaaaccctcccttgggtcaggttttagcaggagcagtgcaggcttcccaaacatgtagtaatggagggacccgcagagggctcctgtcctctcctttcgcagactgtgcctgaaggtgggcagctagcttatcctggtcctgctctcttctgctgtgaaaccaggcaattagagcctgctaagtccagctctgaagtgtgtgttcagataagtgtgtttgttactgactgcacggcacgggtgtgcatgtgtgtgcgcgtgtggctgtcagactgtgggaggcaccggggtctgtttaggacttgttagtgaattaagaagacatggcgcagaagtcgaaaaggcacttttggacctactactcactcctctttactagatttccagtaaagggctggttcctgtaccaaatgcgctctgggtatgaaggtgacagagcctggcgggcggagggatgctcaacactaatgggccccttctccttttaggcctccagactggagaagcagaacagcaccccggagagtgattatgacaacactgcctgtgaccctgagccagacgacacggggtacgtgtgtgaggcagagggagcagggacacggcaggcctcagcacccgcggccctgtgtctgtggtcataaactatgtcttctgttgctcacactgcgaccttcgggctgtttgcccttgtgctgacatgcaggatccgctgtgccacacgaacgtgagccactgtccacctaagtctcccaagacactgcgcctgcagggatggctgtgtgtagctgtgcccctctgtcagccatcccctccacctccttcaccctgtccacagcagccctaacctcccacccaggagaaaggggaaagctcctaggatggctgtaggtgccgggtaataagcagagcccatgagcctcccactgaacaggagaaagcagaccacaggcacagcctgcttgagtgccagcggtgtgagtcacagacgcaggaaccgccagtgcatgcttgtcatgccgtctacatgcagctcttacctgttcgcaggtcaacccggaagggacggcagcggagcatgctctggcaaggtgatggcttattgccagatacagcagaaccccactcggtccccagccccaccctccccagcacagaagacgtcatccggaagaccgagcagatcaccaaaaacatccaggagctcctgcgagcagcccaggagaacaagcatgacaggtacgggccgccgctgcgctctgggagggggttcccaaacctaagcatcatattagtgtggtcctgtactgctttcatcatgttacaaagaaatctgggggctggagagatggctcagtggttaagagcactgactgctcttccagaggtcctgagttcaattcccagcaatgacatggtgactcacaaccatctgtaatgggatttgacgccctattctggagtgtctgaagacagctacagggtacttatgtataataaataaataaataaatatttataagtaaataaataaagtaatctgaaagtaaatatatctagaaacaaaactgactgcagtgtaccaggggcaggagagaaaccgcctcacagctggcaagcaggccggtcttctagccactgctgcgccaagattccctgggccaaagcttgcagagctgtcctgagtggagctacccgagagctgtctgctcccttgtgcacatagagttgagcatgttaacatggtataaggtgactgtaccttcctgtacagagcagagtgcccacagcctctaccgtgcacagcacagcctgagctcagtaaagaagtcttaaacaagagccacgcctcgagggctcccatctgacggggctctgtgcttgactccttacacagttagaaacactgctgggctacaagccgcacttcactgatcgctctctgatgctgtcagaactataaatgggtaccctgtggccatttctgcctccaaagattacaatatggcatttgcttcgatttggggagactttttatttagaaattctgtcagcaccttttatgatttgctcgcctttgctttgaaggccaggagaaagcggtgatctcagaaccatcggcttatgctcctgaagctggagccagccggcctagagaactcactctctattaacgtcatgggttctgtacctcccctgggacgcgtgctgagctggggcagcctcacccctctgcctcggtatcacacgtgtctgtgtcgtgtcactcacggttgctgaggtgcaggcttgccagggcccacctgcacctccatctgggttctagctagccgagtccaggaagttcccctcactgcccgtcatcgctcctgcagcctcacttgccagggtcatgtgtctgtcatctcaccaacacacacacacacacacacacacacacacacacgccagagtaatataaaattacaaatagagatggcttttaatggattttatcagaagttaattttataatctaaaaaaacagggaaagaatgaaagaatgttacttgagactttgggtctgtgacagttaggaacagctttgccaggccaaacctgccacagccttggctgtgtttccttgcagaaagtgcccccagaagtgctttgctctccctgtgcccatgtccttcccaggcattgggcagtcctgcacacggagccatggctaggtggcagtgttgccttaggaactggccctcggacctgttggtttgtgtcctctagcacacagtcagtcctcaggcttcaaacctgcacgataggctacagtgagtcagccacctgctgctctgtcagtgcagacggtcagagtccttgcagagccctctcagcacacggcagccaccatgcctgtggaaagagacagaggtgagacaaggtcgcctccttgctgctgagatcagattgtctgtgggaacagaattggggggaggggggctcagtggccagcggcaggacggtggcatataggtgccaactgggatttaaggaagtgtcctcagccctttagttgtcatctttatagaccgtaacatggacccttgctcctcattctagacatctggatggcaggcaccaggcgtaaaagagccatggctctctcacctctgtcgccccagtcacagactgcagatttcaggcctagaactgtttgtttcggggtgaatgtgtgttcgtgacaggatggggagcctgccgtccagcgtgcacatagggcaggcacagcctccatcccttcattaaccaagtagaggtggggcctgtccagcctctgaggactctacctctcaagtgtttgagctgcattttaacagcttctccgatatcttacagctatattccctgctcagagaggatacacgttgctgtaaccgagatggcagccctgttccccaaagtaagtctcttcctgtttatcttcaaatgagctgctagatgctgcttccaggtgctctgggccctgtgtcatctagggaggagcccagagcccgtgcacaccgggctagcgcagcaccgcagagcttcagcccctaaccttcttctcacgttcctgttccacattgttttcaagtatgccgtctcaaggggctttgagatgttttcactgtgcaggaacatgggtttaataagacatcaatatttaagtcaggcactgcaaggcaacgcaatggagtttaggatatagcacctaagcttctcttcgtaggccacgagttgcaaagctgataatgtttaaaatgccaactagctgggtggtaatggggcatgccttgggaagccgaggcaagaggctaacctgatctacagagcgagttccaagatagccggggctacacagagaaaccctgtctcgaaaaaaaaaaacaataaaatacccagctgaaagcaatcagactttctggggcagctcaggttgctcttgggaactggctcactccatgttgctgcctccacaccctgcagcccccagcagacggctctgctttcatttcagaaacccaagtctgacacggtgaggacttccctccgcctactcacgtccagtgcctaccggctccagtcggagtgcagaaaggctctcccaggagactccagcttacccacagatgtgcagctggtcacacagcaggtcatccagtgtgcctatgacatcgccaaggccgccaaacagctggtcacaatcaccaccaaagagaacagcagctgagctcgggtgctgtctgcctgcccatagactatacacgaactcttcagatttttacaaaacatttaatgatgatttcagactttttaaaagaaagctcagtattattttttgcatgttttctaacagatttttgactgtaatttaacccttgccttatttgtgcctatttgcaacttagttctgtcctgtcagattgtcaccaagtgcttaggtcatgaccccatgtgttcaaaagtcattgttccaagtgtgttacaactttcctgtcctttacaatctctacccatgcctaaagctataattgatatttttagtaaaacattttcttaagagataagaaagttggatttaaaaacaaaaacaaaaaccccagcagcagcagcagcatccgtcccttccaagcatcgtgcagtcaatcaggaagcttcccttccatcctgtggggtctctccatgtgcacgaggagcagagcttcccacttcctagagagagcgcatctcttgggagtgacaaggagcggatccatttctaactcttgtatcatgttaagtgttgtcttatttaatatttttatcttgattttctatctataaagattttaccatcatgctgatgtctccataatgtccaaaaaagtagttagaaatccaccctttacatcagcttccagtcggccacattcagagcaggagcaccgcccactgtcaggggcctgcttccccgccaagccagacagtttacttagaaccctgagtcagtttcacaggccgtgctgctgacatcctccacacggctcctctggaaggatgtcttcccaggtaagacgcagggcctccgtgtccccatcccctcacgggtagttcatgattagaactcctgtggcgctgcacgaagagttccccgtgtgccctagctggtggcagctcccccacagctccccaagggcagaggttgacacccaggccaccgcagcactggcgctcgctgtgctgaaggcactttgtcgatcgcttctgcctgggtggagctctggccctgacctgagggagcaggcagtggctatgttgccagccaggtgcacagacagccaagggcggctagggaccccacccagcctgtgaggacagcagcttgtcccactcatacccctcatgcagctgtagaaaagtagcctgtggctgccagtgctttggtttttcaaggaaccagaagtttgagttatttcatgacatttttcttttcttttctttttttttttttttggtttttcgagacaaggtttctctgtgtagccctggctgtcgtggaactcactttgtagaccaggctgtcctggaactcagaaatccacctgcctctgcctcctgagtgctgggattaaaggcgtacgccaccaccgccaggcttcatgacatttttctaatcagaaatgtggacagtcaatccagacatgcccactgaacaggctgcccatctcagcctccgctggggtctgtaacctgcacatgagtgaacctgtcagccagccctggaaggcagcatcagtctcccatagaacgaccaaagtgaggtgacctcagtatgctgagcctgcctcatagtccctcttacaacatggccaatgcatcctggagacagcatcacctcaacgtgaggctcacagctcggaggaaaggctcagcgctccaggggcctgcccactcatcgatacacacaagcctaagtgctggaggatgtccagcagggccttttagaaaggggccggccagtgtgagctcaggcatcctctctgacaagcttttctgcgtgctccaaggatgactgctcttcctggcaggctccctggagctggttccagcctgagctggttcccaccatccccagagagagcaggcctctgttggaagcttccgggaagagaactgttagaggtggagtggtgcagtcccgttaagtcacgaagaagaatgctgtccttgagaaatcaaagaacacggggccagtacagcatttccagacgctctcaagaacaccagtcagtcccatgtcctcctcaggctgaaggccctgtgtggaggcctgaggagacagcaggaggggccccacacagtccctcctgagacctggctggggttagagcatactgttcctgtgggcaaatgcgttttgtctcaaagctcgccctggccgtttttgggttttttgcacgtgggtctcatcgcctcgcaggagtgagctctgcatccaatctggctgctctctcccctctctgggattctgccttcccacctgtgtaccccactttctaagatggagaggatgaagacacaattaatggagcaggccctgcctcaagctccgttcccggaaggcactgtggcctcagcaccacggtctttacttgccaaagacgaagtccagtgttgcgtgcactcgggactcttaacggcacagcgcaggggctctgccctgacctcagtgacttccatcatggaatgcagcctgaaagccgcgtgttttcatcctccacagcttcggtgggctcgcagtgcagtttcctttccttctttgtcctagctggctatcacccacgctcttacaaagcaaagtgcagcatagagaaaagagcattgcatacctggtgttaagccccctcgctcctcctcctctggtggcttctcagcatcctgaagttactgtccctgcctgtaaaatccttctggaatctgtgccccactggttatgcaataaatcgtctctttaagtgtgtggtcatgtgccccctctagttggtggatatttccagactaggtgggctggggggttgagatttggtcttttgttatctattgtaaagctaagtgcgggctcccaaaacctggttgtcccagagacaagagagtccccactgaagacattaggtgaccctgtccccatgttaactctgattggaaaatagagattccaataacggggcagaagagacataggtgaagtttgggtttcgagggcttggggttggaggaggaccatgaggaaaagaaggcagcaggagggggaatgagagcagccatgggttaggaggaaaaaaaaatggctccgtgggctggccaattggagttaagagcagcccagatagccgggcagtggtggcgcatgcctttgaccccagcacttgagaggcaggggcaggtagatttctgagttggaggccagcctggtctatagagtgagttccaggacagccagggctacacagagaaaccctgtctcgaaaacaaacaaacaaaaataacagcccagatgaaatatagtaataacttggggttgtcagtaggaaatagatcctaacagcatagatgggtagacaacggcctgactttcatactgtttaaggttatggtgaatatgagggttgtttgtgtctttcatccaggaacctaaacaacaaagtcagggtagaaacctcagaccaagattaaatactttctgcaacagtgggggcaagctcccatgtggctgatctgtaaggagacatggtttaaggagacatggtcttggctcagtctccttcctatgttctctgtagcctgttttgttttgtatttgaggcagggtctcatgtagcttaggcgcaccttgagctgtcatccccctgcctctgcttcctgaacactgggattacaagcatgtgccaccatgcccagctcttcacccatgtatccatctaacccggtaagcttaccccagtcatttttaggtcggcccaggctggccccgcacatgcgccctccttcccaacaggcagtcgggtgataaaactaggcccacagtggggccaaccttagccccaccagcatgttttgagaagtgacttggtacttcagatgaaaggaggaggagacaaaagaaccattcctgggcctctccaagtgaagtctgagcaagatgaagtgttacatataccctgtgtggcccagcttgccaggagagagggcctacaaccctcaggttggagccaacagctcacacccagagtgctcctgagccaggttcccaagaccgcctgcagagctgctgagcctatcccacacacaccctgatctgactgcatgatgtgggcgctagagctgttgccaccaccgccgctgccgccactgcagatcaataccatgccagaaggcattgtgctgctgcaggcagactctgtgaggtccatgcaccacacagcacttccccagctctcggttagccatcgtaattccagctgcagttggctgtgtcaggcgttgctctgttctttcggtgggtgacttcttgggagtaccggggagataccttagccagtaaaggtgcttgcctcgcggcctgacaacctgagtttgactcccaggtcccacttggtagagaaaatcaacttctgtgaattaccctctaaccccacgagtgcactgtggcatgtgtacatccacggacacacacaaaataaccctctacagtcttctcggtaactcacagaggaaggtgcatctccatttgacaggagaagaagccagcacacaaggaggcaaactcgcccagcctggggaaggtgaggaatgttgacagttgatatacctgaggcagagaagccactgcgggggcaccactaaggctgctcaaacaaatggctctcagctgtcagcctggggcctccctaacagggtctgggctgcaagctctcaggccggtgcacccagactgcctggtgtcagccaaggctaacagaaaggactgctgagcctacccactgggtcagcactgtgcaagcatgccctccatctgtagggtgagcacagtccatctcacacagagggacccaagggtcctgcctgctacccagcaagccaagggtgtgaggttgttcaggaacgacctctgccctctgaccttcaaccagactgcaggtcctcacattcactcgctttctgtatacaggcatcagtcatgaagcagggctccaagaggtaggtatgatcccagcagcacccctacatccaaccccctgtgcacacctggcccttgctccccattctgaatactctacagccccctcttttctttcttcttcttttttttttttttttagaaaaaaaatgttttaagaattatttattttggggctggagagttagctcagcggttgagagcactgactattcttccaaaggtcctgagttctattcccagcacctacatggtggctcacaactgtctataataagatctgatgccctcacaactgattcttcagccccaattaaccagaaccacataatcttttttgttgttgctttgttttttgagacagggtttctctgtgtagccctggctgtcctggaactcactctgtagaccaggctggcctcaaactcagaaatctacctgcctctgcctcccaagtgctgggattaaaggcgtgtgccactacgcccagctccgaaccacataatcttaaaacagcaaacagccctgatagagtctttaatgttccctctaatatgtcacaagccaggcctcatctgcactgctctcaacattcttatcttccaggctcctgcagaacatcccagagccctcaacactcaatggctcttctagcccaaagttccaaagtccttccacagtccttcctcaaaacacatggttcccaaaacacatggtctggtaaggtctgtcacagcgacaccccactcctggtatcaatttgttttagttagggtttctattgctataatgaagcaccatgaccaaaatacgtgtcttggggaaagggcttatctggctcacacttcctgatcctagtccatcattggaggaaatcaggacaggaacctggaggcaggacctgatgcagaggccatgggaggggtgctgcttattggcttgctcctcatggcttgctcagcctgctttcttatagaatccaggaccagcagcccagggatggctctgcgcacaacgggcggggccctcccttattggtcactgcaggtttgagtgtgtaaaggggatgacgacaggctgaggaaaagatggggttggggagtaagtccacatctccttcatcaatatgggtgaggcgggagaaacttgaactctgggttggtgtcaggacagatggcatcgacttagctaagaacacagagagcagacagaattctgggttgtgatgggagtctggactcacctgatgactgcctggcaccggacagaggctccacggtgagggcatgagagttgcagaaagcctgcggccccgtgaagtaccaatgtggaggttactgaaaaccaaagcctgcctcatgtcaccctgaaaggcctgggaagtgtcaggatctgaaccttcagggctgcactcctgacatgatggaagaagccagcgacgctgcaggtaagccagaggtgctcgcttgctctgtgggcctgtgtgtacagtgataattctggaattctggtttctttaaaacacacaggaatatcctaagaatgtgctttcattttacccacaggggtagggggtggggccgcttctgtttccccagcccactgatttgcctcctgctctagcagaggtatggtttcgccagctgcagatagtttccacgattgtgtgatgagtttttcagagggttgataaatgctaggggccctgagaagtatggtcagtggttggtgtcatttagggaggttgttatggtttgttagttgtgcccaaagaagaaatgtaagaaattagattcagggatcttctcttctttctttccttcctacttagtggtgggggagaaatgggggcaggagggataaattgggaaaaagaacccacaaagtagcaaagaccagctgtgtgtgtgtgtgtgtgtgtgtgtgtgtgtgtatacacgtgcgtgcatactcgtgtacttatttacaagtgtctttgtactccttctactgtgagtctcaagtactaaactcatcaggctttgcaacaaatgcatccaacccttaagccatcttgcgaaactaatttctattcacagcccagaaaggttcagaaataactctgagctggcagctagaagcaggtggtgtggccagttaggtctaagtgctcagtgcggtcttgggagtcatggctcgggtggcatgaacggtggcgaggactcttacgcacaccctgcctacggtgcctagggaaacggagcgctgggcgtttggggaaaggaacacaggggagctgcggagtgcaaggtagggcattgtagcaactgctcacagagcgcacaactgtgtcctggtgaccataaaggtccccatcctcaaatcaagatgagatgtcagactccacatggctgaccccaagccaggtcatggagagcgtcgcagtcctgaaagcaactgctttagttcatgaacagaaagctcctaaaacccgtaagacccaggtggcgggaaagctttctgtccataaaggaacagagctatgttgacttcctgtggcaccacggtctgtctcaggctgtgctgtccgtgtgtccgtggcgcagtgcagtatctgattcctgccagagacttcctaaggcccggctcccctagggagactgaagagagcagcctagaggacaggctgtctgcacagagcttccattagtccatgcccttagctgcatcccatctctatacagaatgatcgttagaggaacggactcaagagatcttggaccactttaagtcaaacagggtcctgtgctacatgatgacatgccagtaacacccagcgcccaccagcctaacacactagaaagcagcagtgacagcctgaggtgatactgagatagagctttacttcagttagtgagcatttgacgagggcgagtgctcacaaatgtgtagtggaaacagagctgggggccacatccaaggacctcagcaggaaatgaaacaggctgagaaccggttccgtgatggaagggaagtgatacagccctcagagcccaggcaaactctcggttcccataaccaggaacaacaccgtatattcagctagagtgggcagaatctggaatataggggtgaaagccaactcgaggaaggctacggaaagatacaagccataacaacccgactgtcgccatgaggacccatggccacttgtattgggatctaacagtggggacaagctcatctgtgattccgagtctcatgccatttctccagggtcacatgtctctctgggcacttaattcccatggggctgcacactgggcttccacagacacaggaggtccctagtcaagcctctgcctttgtcggctagccaaccaagtgaccttgaggactctttcggggtggcacatgttgggctcaagtgctctgtaggattcttttcttcttggtggtgtggagctgggcagaggaccacacaagtggaaggttaagtactccacgctgagaacccccaacccctaggggtagccctcacaacacttccaaacaagggcgcctttgtcaccggctctccagactgccagctcttccacagtacacacatgggccttggggctacacagctcataactggcaataactgcaccaagacctatgagccctcaatagaataacttctgaacagcaatttgaaaacctaaacagctccctcctctctgtggctggtcctccctgagctgacagctacaggtgagatgagaggaacctacgtattcctgtcatggtactcctgtctgtcagggaacatgacttcttcttagactaactctaacatgtacttataaagcattcctgatctctggcggcactgaagccaaggcctgtcggggtgagaagggctctcaggggacgctgcacacccatggcatcctgacatctatggcccatgatgtgcctgacaggtatggctcaactagctagcagcaccctgagcaatggccagcaccaacaccgtacaactgtctggagcggtagtgagtcggtttgcttctctgtgctcaacgtcagtcccaagcaattctgaggtgtccgtgaagctgaggagagaaagcacataacattccctcaggtcagcagtctggaacactgggaaccgactcccttttctttaggagcacacaagtgggttttcatgtaccgctgagaaagccttgactctgggccataaataaggctctttatgacctgccctgagacacttgcgtgtgctctgtgaagcgcatcctgacacactgatgcatgctcgggtgactttggaaatgctgttccctgtgcttagagccctctgtctatagggctttgaggctctacagcaaatggaagacccactctagccttacgcctcccaggccccgggttctctgacagggaaacaatgaatgctctctgcagcacacacccctcagaatgccaggggccaggcggccctagttccagagagcctagtcagcaggtccctcacaacagacatgacagcctttgctcctacatgctccatggtgccctgctcagggctcacacataaggatgctcagaaagagacaaagaacagaggaaaagggggagacaggtgtagatctcttggtcacctggcttcactggcagctgggacctgatccggctgtcacctctcaccagttatggccagggctcttctagattgcactctgccccccaaccagcagtcagcctctgggtctttgcaaaggctgaagccaaggggatcagagaagaacccttggactatctgaagtcaagtcaaggaatgacagcctttgaacagaggctataaccagtcgggacagacagacacagggaggagacaagaagagctgaggatggcaccatgggggctcgacacctggcaggtacccaccttgggctgatagcccttctctgccatggtcttcgcctcctgctgcagcaaagcattggagtgctcttccgcctgcctggcctcctcctcttc

SEQ ID NO: 236 - DNA, 2127 bp, Mus musculus
atgtcgaagcggctccggagcagcgacgtgtgcgccgactgcaacgggcctgatccttcctgggcgtcagtaaataggggaactttcatatgtgacgaatgttgcagtgtccatcggagcctggggcgccatatctcccaagtgaggcatcttaaacacacagcatggcctccaaccctgctccagatggttgagaccttgtacaacaatggtgctaactctatatgggaacactctctgctggaccctgcctctatcatgagtgggaggcggaaagctaacccacaggacaaagttcaccccaataaagcagaattcatcagagccaagtatcagatgttagcgttcgtccaccgattgccctgccgcgaggacgacagcgtgacggccaaagatctcagtaagcaactccattcaagtgtgagaacagggaatcttgaaacctgtctgagactgttgtctttaggagcccaagccaacttctttcatcctgaaaaaggaagcactccactccacgtcgcctccaaagcaggacagatcttacaggctgaattgctggccgagtatggagctgacccaggcacacaagattctagtgggaagactcctgttgactatgcaaggcaaggagggcaccatgagttggcagaacgcctcatagaaatacagtacgagctgacggatagactggccttctacctctgcggccggaaaccagatcataaaagcggacagcactttctaattcctcagagggcagacagcctggatttgtctgagttggcaaaagctgcgaagaagaaacttcaatctctgagtaatcatttgtttgaagaacttgccatggatgtgtacgacgaagttgacaggcgagagactgacgcagtctggcttgccacgcagaaccacagtaccttggtaaccgagacgaccgtcgtccctttccttccggtcaaccctgagtactcctccacacgaaaccagggcagacagaaattagctcggtttaacgcccacgagtttgctacgctggtcatcgacatcctcagtgatgccaagaggagacaacagggcagtcctctgtccaggtcaaaagacaatgtggagctcatattgagaacagtcagtacccagcacagcactgagagccaagacaacgaccagccagactatgacagtgtggcctccgatgaagacacagacgtggagacgagggcaagcaaggcaaaccggcagaagcttcaaactctccagagtgagaactcaagcctcaggagacaggccacagccagtgcctgtcaggtgcagactggctctgaccacaaggacactgcaagccactcgtccctaaagcgacggccatctgcccggggcagtagacccatgtccatgtacgagactggatcaggccagaagccatacctcccaatgggagaagccagccaccctgaggagagccggacgagacttcaacccttccccacgcatattgggaggagtgcacttgtgacctcctcttcgtctctgccctccttcccctccacactttcctggtccagggacgaaagcgcccgaagggcctccagactggagaagcagaacagcaccccggagagtgattatgacaacactgcctgtgaccctgagccagacgacacggggtcaacccggaagggacggcagcggagcatgctctggcaaggtgatggcttattgccagatacagcagaaccccactcggtccccagccccaccctccccagcacagaagacgtcatccggaagaccgagcagatcaccaaaaacatccaggagctcctgcgagcagcccaggagaacaagcatgacagctatattccctgctcagagaggatacacgttgctgtaaccgagatggcagccctgttccccaaaaaacccaagtctgacacggtgaggacttccctccgcctactcacgtccagtgcctaccggctccagtcggagtgcagaaaggctctcccaggagactccagcttacccacagatgtgcagctggtcacacagcaggtcatccagtgtgcctatgacatcgccaaggccgccaaacagctggtcacaatcaccaccaaagagaacagcagctga

SEQ ID NO: 237 - DNA, 2127 bp, Mus musculus; identical to SEQ ID NO: 236

SEQ ID NO: 238 - DNA, 67783 bp, Homo sapiens
  misc_feature (34024)..(34043): "n" at positions 34024 through 34043 can be any base.
  misc_feature (39350)..(39564): "n" at positions 39350 through 39564 can be any base.
  misc_feature (50784)..(50917): "n" at positions 50784 through 50917 can be any base.
acaaaacaacagataataccaagtgttgacaaggatgtgaagaaactggaatctcatacactgctggtggaaatgtaaaatagtgcagccacttcgaaaaattgctggcagttccgcaaaaagttaaaacatagagtaactacatgacccagcaattcctctccaaggtatatacccaagataaatgaaaacatatacccatacaaaaacttatacatggggctgggtgcagtggctcatgcctgtaatcccagaactttgggaggccaaggtgggctgatcacttgaggtcaggagttcaagaccagcctggccaacatggtgaaaccccatctctactaaaaatacaaaaattagccaggcgtggtggtgcacacctgtaatcccagctactagggaggctgagacaggagaatcgcttaaacccaggaggcagaggttgcagagagctgagatcatgccactgcactccagcctgggcaacaaagcaagctgtctcaaaaaaaaggaaacccacaaaaacatatacacaaatacacacagcagcgttactcataatagccaaaaagtggcgacaacccaaatgtccatcaactgacaaacggagaaacattttcgtctaacaaacaaaacatagtacatccatgcaatggaatatattcagtgataaaaaggaattaagcacctgaaacatgccacaacgtagatgaacctccaaaacattatgctaagtaaaagaagaaacaaaaggccacatatgattctatttatatgaaatgtccagaataggcaaatctagagacaggaagtaggttagcaggttgcctgggctggaggggttggggagaaatgaggagtgactactacaggtatggggtttctttttcgggtgaggaaaatattacagggtgggtgcagtggctaacacctgtaatcttagcactttggcaggccaaggcaggaggactgcttgagcccagtctgggcaacatagggacacattttctctacaaaaaaatctttaaaaattagccaagcgtggtagtgcttgcttgcagtcctagctatttgggaggctgaggtgggaggattgcttaagccgagaaggtcaagggtgcagtgagctgtgatggtgccagcctaggcaagagagtgagaccctgtctcaaaaacaacaaaaaaacaaaaaagaaagaaaaagaaaaaaatttctgaaatttgacagtagtgatagttgcataactcagcagatatactaaaaaccattgaataacctttaaatgtagattatataagtgaactatatcgcaataaaaatcttttgaaaaaatcaatctgtatatgtttatacataatacataaaacgaatctctcatgtactgtttgacaagttgcttaattcctcctgagcttcagtttgctcgcttgtaaaactgaacaataaaaaaaacctaccttacagttcttacaaggggaaagtccttaacttagcacggtgcttgacaccacagtaagtgctgagaagagttacctgttattatcatacgcccacactatgtagtttcatatagctgtcactttctccctaaaagggatttgctcaaattgcattacagttattagtggggcttagaatcttcaactaataatatgagttcagagaacaaggagtttcagaatttagctggaattcactttttcttttgagacagagtctccctcttgttgcccaggctggagtgcaatggtgcaatcttagctcaccgagatcttggctcactgcaacctctgcctcccaggttcaagcaattctcctgcctcagcctcccgggtagctgggattacaggcatgcaccaccacgcctggctaattttgtatttttagtagagacggggtttctctgtgttggtcaggttggtctcgaactcccgacctcaggtgatccgcccacctcggcctcccaaagtgctgggattacaggcctgagccaccacgcccggctggaattcactttcgaaactgatcatttaggttttccttttaagtttctttagccatgagctatacccaaataaaaatacccatcctcctttaactaggagtttccttcctatttgctcatttcagctcatccacttttcttgctcaaaagccttaaaaaaaatttattttttttttgagatggagtctcatactgttgccgggcctagagtgcaatggtgcgattttggctcactgcaacctccgcctcccaggttcaagcgattctcccgcctcagcctcccaagtagctgggattacaagcacccgccaccatgcccagctaatttttcatatttttagcaaagatggggtttcactatgttggccaggctagtcttgaactcctgacctcatgatccacctgccttggcctcccaaagagctgggagtacaggcgtgagccaccgtgcccagccaaaaaaaatttttttttaaggagacggagtcttactatattggccaggctggtcttgaactcctgtcctcaagcactgaccccacctcagcctcctcaatcaaaagccctctttactatcttgccatcctcctgccgagctctgaggccaggctgcagaaccagacaactggacaccccttccagcttgcccactagcctcaggtgaattatcagttcccctgtgccttggtacctggcatgcaggaagtgcttcataaactcactgtcacctttagggggactccagcaagaggctgctggctagtcctcctctctctcaacacagacaaccaccctcactcctcttcactctcagaccatcctggtcctgtgtggcccccacgctgagtcagtggaaacaggaatcttgaggccagtttcctaaggtgagcttgaacccccgatgaccaagggggcacatgaggagagcaggctctaggctcttcatcttggatgcctagcccatggctcagcgatttgaatctgtgcccggggcctcacctggcctgccccaggctggagtgagaaccccaggaatgtcctcctcttacctaggtgctatacttttcacctgctggcttcctaaacagggagcctggctctagagtcaggcctcatttgccaccctccacctcacacaacccaggttttccaaccctgtctaaggtacactgactcacctttgcatctgtccccttaagtgttcatgtctcaccatcagtaagaaggccaaagaagtttaacagacttctttagctaagcggccaacgacataagcagaacacaaacagtttcaacttcagcaaccaacttcaaggccccactgaatattaatgagctgatgggttaagaggcactttattaaatgcctctgctgatcaaatgaaggcctgaaacaatctggtagttggcatagttacacaactgcctgctattagtgagacagtgggattggggctggctcacacacacagaaacacgtgcttatcctcttcatctggataaacttgattctttcttgtgttgctgttcctggaacaggaacaaaaaacctggaaaaaaattcttacagctatcagtatacatgctccaagtctcaatcaggtgatagacggaatgaggaaactgacagcagaaactcaccagcaaacaaaacattaagggaaacagccactttattgctggggtgataagaattttttgggttttttttgttttttgagtcggagcctcgctctgtctcccagcctggagtgcagtggcacgatcttggctcactgcaacctcagcctcctggattcaagcgattctcctgcctcaacctcctgagtagctgggattacaagcacgtgccaccacatccagctatttttgtatttttagtagagacggggtttcaccgtgttggtcaggctggtctccaactcctgacctcaggcgatctgcctgcctcagcctcccaaagtgctgagattccaggcatgagccaccgtgcccggacttaagaattttttgtttttaattatgcaatcaatacatcttccttgcagaaaaactggaatatagagcaaaaaagctcaatccccaggtttacaaatgatgattataatagcagcagctactagtaaatattgtttccaattaccatatgcctgcactttcaggtccattatcttccttatttattctccataatcttgaaatgaagtcatttttactgaaagaagtatagtaggggttaagaatacaggatttgggcaaggcacagtggctcatgcctgtaatcccagcactttgggaggctgaggcgggcagatcacttgagtacaagagttcaagaccagcctgggcaccaaaagaagtagattcctaaaaaccaaaactggtcatttttaaagtgtcctagctgagtcttacagtttttacctctgtaccatgtctagtaatagaaaaggaattaaatgatcagtatactaaaatgcctaatggtgaatcatttagtctgagggcatgtgtcatatctccttaactcttaaatagttggtctgtcatctaattaagaacgatgactctcacaaaagtttatcgtatctggaattctttttaaatgaaaaaaggccggcaacagtggctcatgcctgtaatcccagcactttgggaggtagaggtgggcggattgcttgaggccaggggttgaaaccagcatggccaacatgacaaaataccacctccactaaaaatacaaaaattagcctgtaatcccagctactgaggaggctgaggcaggagaatcgctggaacccgggaggcgaaggttgcagtgacctgagatcgcgccactgcactcaagtctgaatgacagagcgagactccatctcaaaaagaaaaaaaaaaaaaaagaaacagaaaagaaaagagggtaattttggacttcggtgagggctcaaccaccttaaatatggcaggttgcaagcacacagcttgcagcacccattcaccaaatggagtaatgctaaccttctcaatttttgtcaaccataagacaaacaatcctcctcttcctctacaatttcttgacaattatagcaccaattttgagccattcaaaaaccaggtctgtaagacactggataaaatgtatgaagtcaacaagaacaaccatactagatttcaggggtaatcacaaatcctcatcctaactgctaagtttgttagcttgaaacttgagggcaccaatacctcccagaattgttgggagactttaaaagcagagtttctcagccaggcgtggtggctcacacctgtaatcccagcactttgggaggctgaggcgggcggatcacctgaggtcgggagtttgagaccagcctgaccaacatggagaaaccccatctctactaaaaatacaaaattagccgggcgtggtggtgcatccctgtaatctcagttacttggggggctgaggcagaagaatcgcttgaacccaggaggcggaggttgcagtgagccgagatcgcaccattgcactccagcccgggcaacaagagcgaaactcagtctcaaaaaaaaaaaaaaaaaaagaaggaaagaaagaaaagcagagtttctcaaccaagacgctgtcggctttgggggccggagaagtcttagttgcggggggctgtcttggccattgtaggatgttgagcagcataaccggcctctacccactaccagaagcacccactccccactttcaacaaccaaaaatgtcccatacattgccaaatgtccccggggggtcgtgggtgcaaaatcacctccaactgagagcactactgctttaaagagatagcaataatgaaaagattaaagcatcaaagcactttagaacaggaagggattttaaggagcctgagaacccgtgattctcaaactttgctaggtatcagcctccctggggagtttgttaaaaatgcggcacctggacctcaccccagacctatcaatagagtcaagtgttgggttctgccccagcaccaacatcctcattctacagctaagttaacgtcggccagagagggaaaatgccttgcccaaggtcacagggcgagttagaacctggactccaaaaccaaccaagcccttccttacaacaaggagagtgtgctattcttacgtctttgaggcagcagaacctaaaaatggttaagacggtgcattccggagccagccggcccgagttaaaatcccgacttggcatttatcagcggggcggcctcgcacaaggcacgtagcgtctgaggacctgtttccttctctgtccagtggaaaagtaacagtacctacccaccagcgttattggaaaggtgaagagagaagatatttaaaaagcccgtcgcacggtaagcactcgatacgtgtcctattattaggactgtcccacacctgcaaagtggaaggggtctggggatcccggggacagagggctggaaatgggctcagggaggcgaaacgacccccgattccccgaagtccccaccgggagacggacccccgccccgcccctcacctggccctgcagctccttctcgagctgccggtagtcgtttttccagactaggaggtgcagggggtagtggtcgcccgcgtcgcaggccgaggacatggcgaggaggccgtaacctggtcctcgtcgcccgccccaagtctcggccccggcggggtctcccgcgcccgcctgcctgccctgaggccggcgagcaagcgagcgtagggcgtgttacgctgccggccggctgagccggtcgggtgcggggcgcgcgggaggtccggggtcgccggccggctcagggaccaggtcggccgcgcccaccccgcgccccgcggcgttcccgcccgcgctgacagctcgcggacagacttctgcggacctaactgccccaaacagggaagtgcggagagcgaaccaccgcatgccgcggcggggataggcgaccttgggcaccgggtccggggtccgcgccattgcacccacctccagctcacaccgagaaactcagtgcagcccacagaacagagctgaggctcattctcttggccaaagatctccacgcggaaagttccgtctacctgtccccagcttctttccccctgctccagtagccccatgtggttcggtccacaactgggcctcttccattggctctgaagtcagggggtgacaactgagccccggaccaaaccattccagctgccgacacccttgcagcctttttggagcaggacagatgcttccacgacgggtcaaaagccattttggaagtgggcaacaccggacaatttttgaaggaggaacgctaaaccctggcgaagtggcttcaaatacagtatttgcataaaaggggatatttctacttcatgatttctcaacctcggcacatattgaactgggcagtttttgtgtgggggttgtccggtccttgtaggatgctgagcagttgccctggtctttctccccactcaatgccagtagcactccccaaaacatgtctctccagatattgccaaatgtcgtctcggggagaaaaatcgtcctcagttgagaaccgcttctatttgaactccgaaccgggttatgattcaatagctaactatggtggtgatttagtccatgtatgaatgtcatttttaagctagctttttggatttgaggttatggctgaaaggactgataaataatatacatatttgaccacagtctgcgaatatgaagtttattctttgagtttcaggcactatgcctccttgactcaatgaagaaccaaatcaacttacagctagctactcatgggcttgaactttctgctgctgcttcagctcagctgtctacaactagaccacatagctggatgaagctatttaatgcattgtgaaaacattccctctgccctctgagtgtatgcacatccagctcttcagatgcctgcaacaacagctgttcaagaatcccaacctaatccattctccacagatgtggagcccagaagatttgtgagttgttaaaccaaaacaggatgcaggagcaccaggatggcacccggagactctaaccatggaatgcgtgggaattctgtgattatttctccatcacacatttatcacactgtagagatggactcaagaccagtgcttctgaggccttttccagcacttctcattctttcagatgccttttgcaacttaacgttctccttcttcttcatcatgccgtgtttattgaaaatctccctatctcattaatcagaaaaccccataatgacaggaaccacatcgttttgcttaccagagtatctaaaaccaaaatagtacctggctaacaacaggcattcaatatttgctgaatggagatcatagctgtgtttatatgtaagacagacaataagtagtcattggtattagggtcacatctcctttctccttcacactgatttacctcatttcattgtgtttatctcacaccattttgtaaattatcccatgttagctattgttattctcaaattccacgcatatgaagaaaaacagtaattagaaaataatagcaatatccataattatgggagctactatttactgaggggttactatccagcaggtgtatcacatttttcccataatttattccatctgtccttagccaaaatgaatgtttaactttgctggtcacatacaagttttgtcgcatattcttcttcctctttttctttatttccctctctctcttcttcattttcatctcgcaaccctttaaaaatgtaaaaatcattcttaagtagcaagccatacaaaaacaaatcgtggactagaagtaaacaatgcattatcttaattttgaacatgagattaaaactgaagcctaaggaatcatctaatatattcttttttgttatttttgttgttgttgttgaagttgtttttgagacagtctcgctctgtcccccaggctggagtgcagtgacgcgatctctgctcactgcaacgtccacctcccaggctcaagcgattctcatgcctcagcctcctgagtatctaggattacaggcatgcgccaccacgcccggctaatttttttttttttttttttttttttgagacggagtctcactctgtcgcccatgctggagtgcaatggcgtgatctcagctcactgcaacctccaccccctgggttcaagctcctgcctcagcctcccaagtaactgagattacaggctcctgccactgtgcccggctaatttttgtatttttagtagagacggggtttcaccatgttggccaggctggtcttgaactcctgacctcgtgatccacccgcctcggcctcccaaagtgctgggattacaggcgtgagccaccgcgcccggccaatttttgtatttttagtagagatggggtttcaccatgttgcccaggctggtctcgaactcctgcctcaagtgatcctcctgcctcagccttccaaagagttgagattacaagagtgagccaccacgcccagcctggaatcatataatatattcttattttactttaccccagtaaaatgcaagcttcataaggactagaaattcagtctttgctcactgctgtttctccagtggctgggacagtatataaagcatggtaagtgcttgataaacatttgttgaatcaaggaatgaatgaatgaacttgaccattgattgcctcaggaaggttgtggctgcagggttctcatcacaagatattgctacttcccctggtattaatcagttgggacgaggggaatctctgccagagaagaagacccaaattcaatatttaaaggtaggacagatgatactcgggcagtctcctgccctcactcaagatggcgacaaggcagagtgccctttccggtcacatgacctgacactcgccgaagggcacctccccgcgcgtgcgtgctgtgccaaggctgcaaggcgctgaggggagaggcgccgccgtcagcgccgccgcagctgggacccgttagagcggaagcgccgccgccaccgccgcctttgctgtcccccggcctctagttccccgcaggtgggaggtgggagccatgtcgaaacggctccggagcagcgaggtgtgcgctgactgcagcgggccgggtgagtcgcaccggccgggcccgctcccctctgctttcctggcccggacccctaccccggggccgccccctcaggtcaggctgcatcccgcggctagggtcgcaacgaagaggtccctgggcggccttggggtgggaaccgtcccgggcctgtcagagccgggcgggcagggggccgccgccctccccgtccctcgcggccctcccttccctctcgttccctcccgttccctccgtcctaggccaactggggaggtgacgggggccagggctgctcccccaacaggaaggggcttgggcaatccacaggaaagccaattacagaagtaaaatgtgagcgtcctcccggctgcagcctccagaggctgcaggtgtcacctcccactagaccctttctccgcctgggtgtcctgcccggggaggatgacactccctgagactcgccagagggtccccgtagatgacttccccgctgctgacatccgacagctactctgcccgggagaattgccaggagatcggggtcttccaaacacaaccagcacttaggaggcagtgcttgtctcaagtttgaggatctgaacggcctgggttcaaactagattttgcttctggctgaccttgggctggtgacttcacttggtcacttgcttgatttcctcatttttttcaatgaggataatcgggagtatcacgcttagtggtgaggaagattcaatgaatactcgtagaatcatatcatctaaggcttttcttttttgcattatgctgtctacagtagaactcttgtagtcccttaaagctatatttgactatctaaatcatacgttgattacaacggaaacaaacgcaaaatcaccagcaatataggggcattgaaacgctaaagccattccttcataatgatgcataactgttcatacataatattcacatttagagatcaagtgtgtcttagcaattgcaactgaattgtcaggtctctggatagattattacatgctgttttaggtgcttggatgtattggctttgagttaattcgaaggtaacatggctttcttggcacaatagtgtccgataaacaatcttaattaaatcattgaacaccactggctttgcaactgttctgatcttaagcttgtcatttggaagtggagaccaattgtaaatagaactgtgataactcaaacctcatgtggttgttttatggcccgtacagtgcaggtgttaccagtttcctttgaagatagggagggggtatggaggagtttaaaaagaagtgttttctaaaccaagttagtgtgagttatacaaactccatcattttctctaaaaatgttatttgttccacttccttattttcttgcctattttcagttgaacttaccgtgatgtatttgattcacatgtgtctagcttctaacttcctcttggaatgcatattgttttgcttcttgatagggtacagggcaaagcaaaattgttcctccattgccatcctaaatatacttttgcagcattttgtgcatttcagaacattttctcttccattgtatcgctttagttgttgtctcatacgcctaatctgcagagacttgagtcacttccttcctgttttgaatataattaggctaccttgaaatattctgtgaaattgagcagctgggaatttgtgctgccttttctgcacagccctactgagagaattacctgtagggttagggacccctttgagattctgttgaatgctaaggccttctcccctaaaatgcacgtgaacgaatttacctaagatttgtctgggggagtcacaaacatttttgaagttcatttgtggtgtccctggagccctggctccagatgaacttaaagggttttacccaatctcattcatacaaacatttttattttactatgttaacattctaatattctttccatgggattctgatccaggatgctaaagtggttagtcgaatacttgtcttaattaatatgtgttaaatacttgctaaaaaaagaatactgcaaatcctctgaataagtgaaaaccaaagctatgcttcaaaacagtcttttttttttttttttttttttgccattagtgtcagtactatactgcaggaagcagtgttgttaatgcatctttgtagagctccttcatctggacatttccaatctctgctttttaggatgatacagtaatagcgacagagttatactaaattgaattattttgattctgttttattttatgcaaacatttaaccatgatcacatcttcttaaatattctacttttttttttttaatgaatctggttcatttcaaatacatcacactctgagttcaattacttgaaaactccatggagattttcagtacagtagtagagtggtcacatgaaatgttcaatgttttaagtatttcccatcaaaaactttgtccagtgatcatgaatttcacgtctagaaaatatctgaatactgagaaaataatttagaaaagatataacaactaacattactactttactatgtgtgaggtacttcacttattctctatatccttactatcccgagatttgtcattgttctcatttgaaccatggtgaaaacactcaagtaacttgtctgagatcattgtgcaagaagtggcagagttggggttcaaaccctgaactccttgtctctagagccaaccctcttaaccaccatactcactggctcccaggattcgtctttgattgaaagcccataacttttcattatatggtttgaaagggtttgaataaactcttaaaaaatggtaaagatggtgtacatgcattttagagatttttgtggacattgaagaatttttaaatgtaaccctttgaccaggcagcttaagtggcacctattgtcaccccattgtgagtctgacgaagtatagctctttctttatttgaggtttctaggtattcagtttacttacccagatccatcctgcttgccaagtatgaaattattccttgtttcaaaggacagctaatgaagctctatgactttaaagggaaaaaagtattatacacacactaaaaatattattcatttttattttacatctttgcctctgtgaagctgctgttattgcaacttcttttttttttttcagatcagttgcaggattggacttggtagtttatgtaaaacaattaattggctgggcacagtggctcaagcctgtaatcccagcactttaggaggtcgaggtgagtggatcacctgaggtcaggagtttgagaccagtctggccaacatggtgaaacctcgtctgtactaaaaataacaaaaattagccgagctggtggcacacacatgtaattccagctactcgggaggctgaggcaggagaatcgcttgaaccctggaggcagaagttgcagtgagccgagattgcgccactgcactccatcctaggggacagagtgagactctgtctcaaaacaaacaaacagacaaacaaaccaattcatggacatcatagaacatttcctaatggaagaggccaggtttccctgtcctcagaaccatagcagctgagtgattttatgattctgtaactcgcagctttctgctaagcatattgacatgttgattcatagcagtgaattaggacagcagtctacaacatttactgcagaaaatgctatctgcataattcactgtcaaaattatattatcttggccgggcacagtggctcacgcctgtaatctcagcactttgggaggccgaggtgggcggatcacctgaggtcaggagtttgagaccaacctgaccaacatgatgaatccccgtctcagctaaaaatacaaaaattagccgggcgtggtggtgcatgcctgtaatcccagctactcgggaggctgaagcaggagaattgcttgaatctgggagatagaggttgcagtgagccaagattgtgcctctgtactccagcctgggtgacagagtgagactccatctcaaaaaaaaaaaaaaaaaaaaaaaagtattatcttgatttttatggagatggatccaaaatcattcgtctgtaccctctcaatttgctttcttagcttgaatgaaaaagcatgcatctgaaatggtagatccacattagggctacaaactgtggccctgaaccagaaagaagataactgtttacccaaggctcccactggtgtttttagtctcaattaacattgtacctaatcagccaaggtaggtcataccatccaacaagatgaccagcctgatgcattgatgagcatactgaaacaaaaatgtctcctttttctgacaaaccaaacttcagtcatcttttgccatctggcggtatagcaacctgctggtatccctgccactgagatttcactctctttccagatccttcctgggcatcagtaaataggggaacgtttttatgtgatgagtgctgcagtgtccatcggagtctagggcgccatatctcccaagtgaggcatctgaaacacacaccgtggcctccaacactgcttcaggtaaaggataagaattctcctgacagttggtaatttacattttagggctcatcatgttaataacttaaatttctcctggtgtacttcttccataagacaaaactgtttcataattgaatagagatggcatgcccatcaatgctatttacaaatattatctgtattgaattcagtaaagacttttcttcctacttgacataaatcttgttcaacaagctcaattataggtagatagatgaatagtcattaaaatatcttggtactgttgctctgttgactttctagactgtcatcggaaatgttttttttttttttttgagacggactctcactctgtcatccaggctggagtgcagtggcgtgatctcagctcactgtaacctccgcctcccgggttcaagcaattctcctgcctcagcctcccaagtagctgggattacaggcacccgccatcatgcccggctaatttttgtatttttagtagagaaggggtttcaccatgttggccaggctggtctcgaactcctgaactcaagtgatccacacctcaacctctctcgaagtgctgggattgcaggcgtgagccaccgcgcccggccagtagtccatcttttctatgcatgataatgaatgtttctgaaggctactgcctgagaatcttttctttaatgtacttattcctgagtacctgctaatatttttagaacatgtttttctgctttgatagcagcatgggctgggattcctcagaaacttctgaaacattttaagttttcttaaagctcttgttactagtcagagagaccaaattaaattaatatgttttgattgcatgtagaataccctgttaaatgagttctttgttttatctggagtccaatgtcatgtcacctttacttctatcttggggtacacattcttcaagttctcttggaactcaaggttaagtgtgtgttttgccttcatttgtcttgattacacatttcactgaatctgtgacagctgcacatatcccttaaacttggctgtgtgaaccaaggagccaaaacaagtgggtttgtatctctgatgtgaaaataactacactgctgtaaaaaacagatggggctgttttaggagtcatgccttgaaatgaaatttggagatatgatttattactaacttttgcttagaagtttctaaccgctcacgctcatgtgaaaggggctgtttactgctctcaggtctgtctgtgtttgcaaagccagattgtagtacagagtctcagtaaagtccagagatgagttgtttagaatgccagggttgaccctaaagcaacaattccccaaatgtggaaccaccagtggtattcaagacagatgtaggtaatacatgttttttttaatggttacattattttactgtgtatgggaaagctataactagcacatcaaactgtagttgtttttacaagtaagtggctttaaagacaaatattaagtgaataatatagacagtacatgggtcattaagaatgttgaaaatagtgtttaattaggtttgggaaaccctgctctaaggtgtcagagtacttttttttctttcatacagaataagaacagttcagtcacactttaggtatttaactatcctactagtcaaagctgaatcctgcatatagattgatcatctttctcattctcaaatcagaaaacaatgatatgaatgatattcctaacaaatgagtgtttataacaggactttgtttactctgttcagtcactgatccccattgaatatttgtgaaaagaaattaaagtcttatgtcatcctgcttggttttagatggttgagaccttgtataataacggtgctaactctatatgggagcattctttgctggaccctgcgtctattatgagtggaagacgtaaagctaatccacaggataaagtacagtgagtggaatgtttataaatacttttatttcttcataacaaatggggcccactgaaaggagtgcagctatttttggtcagtctccgcaagggcagcagaggagggggttaccctagttgtgcatcaggttctttgctattagaaatgcagaatggggtggggcaggaccatctgtttagcatggccacccagcaggagtaagtggcttcctcagttggaaaccatggcttggagtctgtaaatgtaatcagatttaaacttatactcaaataagaggcgatcagaccagaaatctaggtctgggcacccgtctgcctgttgcctcacttataagatgggactaaatgctgctttctcccaaagttgctaaatcagttcagacaattacacagagaagagggctactataaaaagcaggtactctggagtcccagccattataataactaatgtatgttttcaaactgcaggtcttaaaccttgctgaaacttacttgagcattgttcattttattctcaagtgggggatgtgggtcacttcctcttctttttacagtacaaagaatggggattgttgtatctgaacgagtgaactgttttcttttttgtttttgaaccagtcccaataaagcggaattcatcagagccaagtatcagatgttagcgttcgtccatcgcttgccctgccgggatgacgatagtgtgactgccaaagatcttagcaaggtgggtcacaccttttaaaatccctaaaagagcgggctgagacagcatattgttttatttgaaaaaacgaaaaaaaagtctggttgtgggctttttttttttttttttttttttgagacagagtctctgttacccaggcgggagtacagtggcgcgatcttggctccctgcagcctctgcctcccgggttccagcgattctcctgcctcagcctcctaggtagctgggattacaggcgcatgccaccatgcccagctaatttttgtatttttagtagagacggggtttcaccatgttggccaggctggtttcgaactcctgagctcaggtgatccgtctgcctcggcctcctagtgttgggattgcaagcgtgagccactgcacccggccagggtttttttgtttttcgtttgttttttttgagacagggtcttgctctgttgcccaggctggagtgcagtggtgcaatcacggttcactgcagccttgaccatccaggctctagcaatccttccacctcagcctcccgagtagctggaactacaggcgcattaccatacccagctaatattttttattttttgtagagacgggttcttgctatgttgcccaggctgaaaaaagtttttaaagaaagaaaaacaaaaactcatttctgcacattcattaattaatagcttttttgtcagtcggtttcgtctttaatctgaattcaaatggcagccattcatatagtggaggttcagggcaaagaggaaaagtaagtctctggaaggctgtttgtgtttttccaatatggcttttaaattatattttgataagttttttgtttgtttaactttgaaataggaaccatctcagagttgtttctagaagggactagaaagattataggacaattgtttctttttaataaggactagaaaaagtactaaaggaaggggacttcttcaggtttccaggttgaacagtaagtatgatcttcagaaagcaatgtgtgactcaaagctatagtacacagaatggtttatgatacttgtaaaacgagtgaggtggttttctttatgtgggccttcgcatgtttttgagagatgctgtaagaaatgtgcatattttcaaagcgctgccttggataaatgcttactcacacagagcatgagaacttacttattcagaactttttttattactttttggccgggtgcgatggctcactcctgtaatcccagcactttgggagactgagactggcagatcacttgggctcagaagttcaagaccagcctgggcaacatggcgaaaccccgtctctacaaagaatataacaattttagccgggtatggtggccgtgcctgtagtaccagctacctgggaggctgaggttggaggatgacttgagcccaggaggtggaggttgcagtgagctgagattacaccatggcactccagcttggacaacagagcaagaccctgtctcaaaaaaagaaaacattttctgcatctattgagatgatcatgtggtttttgcttttgcttctatttatttatttatttatttatttatttttatttatttttgagatagagtcttgctcagtcgcccaagctggagtgcagtggtgcgatctcagctcactgcaagttctgcctcccagttcatgccattctcctgcctcagcctcccaagtagctgggactacaggtgcccaccaccacacccggctaattttttttgtatttttagtagagacagggtttcaccatgttagccaggatggtctcgatctcctgacctcgtgatcctcccgcctcggcctcccaaagtactgggattacaggcaggagccaccgcgcctggcctgcttttacttctattgatgtggcaaattacatttattgatttgtgtatgttgagccagccttgaatctcagcaaaaaagcctacttgatcatgatgggttaatttttttatttttatttttattttttattttttatttttttgagacagagtctcgctctgtagtccaggctgtagtgcaatggcatgatcttggctcactacaacctccgcctcccaggttcaagtgattctcctgcctcagcctcccaagtagctgggattacaggcacgtgccaccaggcccagctaatcttttggtttttttttgtttgtttgtttgtttgtttgtttttgagacggagtcttgctctgtggcccaggctggagtgcagtggcgcaatcttggctcacttcaagctccgcctcccgggttcatgccattctcctgcctcagcctcctgagtagctgggactacaggcgtccgccaccacacccggctaatttttttgtatttttagtagagacgaggttttactgtgttaaccaggatggtcccgatttcctgacctcgtgatccgcccacctcggcctcccaaagtgctgggattacaggcgtaagccaccacgcccggccattttttgtatctttagtagagacggggtttcaccacgttggccaggctggtctcgaactcctaacctcatgatccgcctgtttcagcttcccaaagtgccgggactacaggcctgagccactgcgcccagccatggtggattaacttttgatgtgctactggatttggtttgctaatattttgttaagagttttttaaaaaatctgtgttcatcatggattttggcctgaagttttccttttttgttgtgtctttgccagattttggtatcaggctgatgttggcttcacagaatgagttaaggaggagtctctcctctttgattgtttggaataattttagtaggatgttcttctttgtatgtctggtagaattcagctgtgaatctcttgaactggggagacgaaggttgcagtgagctgagatcatgccacggcactccagcctaaacgacagagtctcactctgttgcccaggctggagtgtcgtggcacaatcatggctgactgcaccctcaacctccctagtctcaaatgattctcccacctcagcctctcaagtggctgagatctcaggcatgtgccaccaagcctggctagtgtgtgtgtgtgtgtgttttgtttttgttttttttagatagagtctctgttacccaggctggagtgcagtggcacgatctcggctcactgcaacttccacctcctgggtttaagcgattcacccgcctcagcctcctgagtagcttggattacaggtgcccaccaccatgcccggctaattttttttgtatttttagtagagacagggtttcaccatgttggccaggctggtcttgaactcctgacctcaagtgatctgcctgcctcggcctcccaaagtactgggattacaggcatgagccaccgcgcctggccagtttttgactttttggagagatggggtttcaccatgttgtccatactggtctcaaattcttgggcttaagcagtctgcctgccttggcctcccaaagtgctgggattacaggcgtgagccaccacatctggccttttttccccccccttttttaatccccagcagaatctggctgaagaattcagaatttgaaattttgcatagaaatgcatatactagctacttccattgattaataagacttggtatgtgttgggttttttgttttttgtttttttttccttgccagagttttaaaaaattaggcacagtggcacatccctgtaatactagctacttgggaggctgaggtggaagggttgcttgagccaaggagttcagtcctgcctgggcaacataacgagaccctgtgtttaaaaaacaaaaaaactatttaaaaaattaaacttagatgttagagtagatttcttcattcctgtgataagggttactgcatcttggacaattctaggttagatttgaaggaaggcagctcatcttctgactgtataagagcttttctgcagtagtacagaattcggtatatcacgggccttttcctaccctgaaagactttattaaagcatattatacaggccaagaataatgtggtagagagggtattgtataaggcaggatcctgtagcttacacagtgtagaatttgaagtcctaaagccctaattacagtaacaactaataataataactgttattatagcatttgtattctttgagcactttattatatcactaaatccttataataaccctgtgaatagggccaggcacggtagctcatgcctgtaatcccaacactttgggaggccgaggtgggaggatcacttcagctcgtaagttcgagatcagcctgggcaacatagtgagacctcatctgtattgaaaaataaaaagttagcagggcatggtggccggcgcctgtagtcccagctgtttgggaggctgaggtggaaggattgcttgagcccaggatactgatggctgcagtgagccatgatcactccactgcactccagcctggatgacagagcaagcgagaccctttctaaaaagaaaaatgccacctatttaaaattttttttattttttattttttttgagacagggtctcgctctgtcaccaaggctggagtgcagtggcatgatcacagctcactgcagcctccactgcccaggctcaggtgatcttcccacctcagcctccttagtagctgggactacaggtgcgcatgccaccacacccaactaatttttgtattttttgtagagccagagtcttgctatgtggcccaggctggtctcaaacccctgggctcaagtgatcctccaacctcagccccccaaagtgctgggattacaggcatgagccactgcatctggccattgttgacatttttgagatgaggaaagtgaggttcagattgcttaaagccctttctccaggccacacagcttgaagtgggtatagtttgaaattcaggtctgtcgtatgtcagagccacgcatagtcacctcttcacacagtcctgcctctcactcaggttctggttgtgccacttcttagataagtcatgcatttgggcaagtcagccttcacagccctagtttccttatcagtaaagtggcctcactccaccttacagcccagggacagttgtgactggcaaaggagagactggtccatgcactttaccgagacaaataaagattatgcgttactgatgtaacatatattaaaatggtctatcagctgccctaggacatcattctttacacctctaaccacgattccttttttgtttctgcgtttttcagcaactccattcgagcgtgagaacagggaatcttgaaacctgtttgagactgttatctttaggagcacaagccaacttctttcatcctgtaagaaaacatgaattgcttcagatattgaaactaagtgagttgtgttcatgtagcctttatttaatgtgctcttttgcctactttttattaatgattcttaggaaaaaggaaacaccccactccatgttgcctccaaagcagggcagattttacaggctgaattattggcagtatatggagcagacccaggcacacaggattctagtgggaaaactcccgttgattatgcaaggtaagagacctagattctcgctacttctctctgggatttttttgttgggtgtgattccttgttaagtagctaagttgtatatgttgatattgaacccctttaaagatgtacgttattttattttacagatgaagacatttcaaatgcatataagctcagcctggcaaagttgaggaaggctagaatcatgaaccagtgtgctaagcttccagtcttttacttgatcctttataacacagtgatgtttgagctgtagtcagattccaaatcaagtatcaagaattacagaatgtactcttctgttttttaatactcttagttatttcttgaacttaaaagcaaatatatacatagatatgtgattaaacaagtatagtaaaaagttaattgtaaggtttgggtagtagacatctaagtgctcactctaggccaggcatggtggctcacacctgtaatcccagcactttgagggtccaaggcgggtgggttacttgaggccagaagttcgagatcagcctggccagcatgctgaaaccctgtctctactaaaaatacaaaaaaaaaaattggctgggcatggtggcaggcacctgtaatcccgctacccgggaggctgaggcaggagaatcacttaaacctgggaggcagaggttgctgtgagccgagaccatgccactgcactccaatctgggtaacagggcaagactctgtctcaaaaaaaaaaaaaaaaaaaagtgctcactgtaaaattatttaaatttttctttattaataaagtccttgaaaaataaatctataggttagtcttgaatatcatttaaatggccaaagatcagtcatctttccttctttttccaaagtacttttattaactgtgaagcacaatactctgttccacagaggataaaatgggtgaataacaaaactctgccttcccagaatttactctcttggaaaagatgattcataaatgcctgaaagagttcaaggaggcaagaccatatgggattcattgccaaaatagataattggtcttaaaaagcatatatagggtttcttcattgtggtccaaatcatttaagaaatttcttcagctggtcttgaagaatgggttggatttgaatgtgtgaagggagagctgaagcattccaggtaagaggaaaggcaggagtcaagatcaggaggcagggagggacaaagtgtgttcagcacagcaggagacctgactggaaagaacagagtgggtctgggaataacagcaggagtacagtattgcatggtgcttcattatttcacagagcactaaaaaagaaaagagttcagccaattaaattatggtgtatcatcaattgtaggacatttcctgatttcacagatactaaaaaatgaaaataagatgtgcctctcacaaatcaaagctgtgtggtaggttgaagggtgttgtgagtgccttgaatggtggggagagaagctggctgaaactatcaggttggtgcaaaagtaattgcagtttttgccattacttttaaggacaaaaaccacaaaatatacttgatcttggacgagagccctgggtaaatgatacttattatcacttaccttggaattttcgcacttgtaccttgcatataataatctcaatataatttgtatccttgttgctgaaaggattctaagcagcctaagtatttatttcatggatgttgaaaggtaaacttaatattttctgttgtgcaaattgaagataaggaggcagaagtagctgcaggcgtgagctgtgcgttaggttggcgtgtctctcactgatttgaagcctttgaagtggttactagactcttatccagagtcagactggctgcatcagcatcacctaggggaaggaccttcttcaacatattggcccctggccccatcctgtccccattgattcagaatttccaagggtggggcctgcacatggtatatttctagaaatgcgctagttaatttttgagaacttctaccgtaaaccattgattaatttcatttttttacctcattaaattaagtcattctgtatccttccctctcataagtctttgaatttcttattaaatattctattttggccttaataaaggaaaggcgatagttcagatggtgaaaacagtttataaaagtgggatgcaaagtagacttcagaaatctacctaccacaagaaggttgatgattctcaaaagtcttgtgtgataaactgctcaggtgtctcaggagacgtctttgtactccattttaaagtcagtgaatagtgagcaatataaatggtactttgttttctcttggtaggcaaggagggcaccatgagctggcagagcgcctcgtggaaatacagtatgagctaacggacagactagccttctatctctgtggcaggaaaccaggtgagtggatggagaatgaccgtttcacatctccagttgggaaggttctagaaaaacaagttgggacactatttgttattacctcctctgctgtaacatatcactgagaaagctatacatacggcttttaatttgaaaggataactacagaattgtcagttacatgtaaaagatataaagttggacaaaactccttagatttttcatttttaatagctctagagaaatgactatttcaagaatcagactgaataatcaaagcaaaattgaatgggtaccacagttcttgaacatggtgggactaggaatgtaggagcaaagcaataacctttgtagttatttgaaaaattcttcttaaggaatggaaaaaaagtccagaagtaaactttgccaaagccaacttggctatttgtgatagggaacaggggtcagcaaaccatggtttgtagcccaaatctagccagttacttgttttattaaacaaagttttgtatcgtgccactgcacttcagcctaggtgacagagtcagactctgtctcaaaataaataaataaaaataaataaataaataaataaagcttctgccgggtgcaacgggtcatgtctgtaatcctagcactttgggaggccgaggcagaaagactgcttgcacctaggaattcgaaagtagcctgggcaagaggggtgagactccgtctccacaaaaaagttttttaaaaaatcagccaggcatggtggtgtgcgcctgtagtcccacgtacttgggagactgggacttgagcccaggaattcagggtggcagtgagctatgattgtgccactgcactccagcctgggtgcagtgacaaagcaagacccccaactctctaaaaaataaatgaataaagttttattgcaagaaagccgcgcccaattatttataccttgtgtatggctgctttcacataacaacagcagagttgaataggttaagtcgttgcaacaggccagatggccacaaagcctaaaatatttactatttggccctttaaagaaaatattggccaacccctgatgtacaacattcacatacatgtatgcagtgattctccatcctggttgtatgatagagttaagagcctctggtatagtttcagttctgggtgagatggagtaagcacaccccaccgtgtctcctgcaaaatagaactaacagacctggaccaaatgcttggagtagctagctaaagactctgaaaagtaaatcctggttggtagattagggaactcaaaagtgtcatcagctggtggtgagtgtcctgtttgtcttacttctgataggacttcaatgacagcctgaaacctggaggtacataatgagtgcaaaaaagcctttttctgcggggtgcggtggctcacgcctgtaatcccagcactttgggaggctgaggtgggcggatcatgaggtcaggagatccagatcatcctggccaacatggtgaaaccctgtctctactaaaaatacaaaaaaattagctgggcatggtggcaggcgcctatagtcccagctactcgggaggctgaggcagaattgcttgaacccaggaggcagaggttgcagtgagccaagattgcgccactgcactccagcctgggtgacagaatgagactccatctcaaaaaaaaaaaaaaaaaaaagcctttttctggttaaagagcaggaaatgggacttctacaggacagagaggaaggggattcccctggggttttttcctcctcctccttcctttttctgatctctcccatccagcccctaggcaagcctgtggctgcaatagcagcagcagcagtggcagcacaggttcctaaatctctgagcaaggggatgaggggggatcctgattgcttgtctttttctctctattctctcaccatctgcccaggaggcagaacctcacctggtcagttgcctgctaagacaaaaatatgaacatttttgcataaagtttaaagaaggcccagagtctcataacaaaacattcacagtgtctaggatatcatccataatgacttgacatctgagtaattctcatgtacttgccagggaaggcagccaacagatgccaaccccaagatgacacaaatgttggcgttatcagacaaagattttaaagcagctagtaagaccatgctataagaagtaaaagcaaacattcttgaaacaaacaggaatatagaaagtcccatcagagaaatagaagatacagaagagaaccaaataggaatattagaactgaaaaatacaaacactaaaaatttaaaacttactggatgggcttaatagaagaatagagatgacaaagaaagtcaatgaattgaaaacagatcactagaaattatctggtttaagcaacagagaggaaaaaagagtaggaagaaaagactgaacagagtctcagggacctgtgggaaaatactaaaatgtctgacatttatgtcgttggattcccaataagagatgagaaagagtggtgtgtgcagaaaacgtatttgaagaaatattggccaaaaaaaccctctaaatttgggacaggctcaatggctcacacctgtaatcccagcactttgggaggctgaggcgggcagatcatttgaggttgggagtttgagaccagcctggccaacatggtgaaaccccatctctactaaagatacaaaaagtagccgggcatgttggtgcgcacctgtaatcccagctactcaggtagctgaggcacaagaatcacttgaacctgggaggtagaggttgcagtgagtccagattgagccactgcactccaacctgggcaacagagcgaaactccgtttcaaaaaaaaaaaaaaaaaaaaaaacctctaaatttggtgaaagacataaacttacagattcaagaaacttagaaaattccaaagaagataaactcaaatccacagttgagacacatcaaaatcaaactgttgaaaactaaagttgaagaaaacatcttgaaagcagccaggaaaaagtgacacataacatatatagaaaaacagtgatttgaatgattgtggatttcttatcagaaaccatagagatgagaaggaaatgaaataatactttgtttgtttgagatggagtatctctctgttgcccaggctggagtgcagtggtgcaatcttggctcactgaaacctccgcctcccaggttcaagcgattctcttgcctcagcctcctgagtagctgggattacacgtgcctgccaccatgcccggctaatttttgcatatttagtagagatggggtttcaccatgttggccaggttggtctcgaactcccgacctcgtgatccgcccacctcggcttcccaaagggctgggactgcaggcatgagccacctcacccagccagaataatacttttattattattattattttgagacagggtctcactccatcgcctaggctggagtgcagtggcgtgatctcgactcactgaaacctcaacctcttgagctcaagtgatcctcccacctcagcatccacagtagctgggactacaggtgtgtgccactgtgcccagataacttttgtattttttgtagagatggggtttcaccatgttgcccaggctggtcttgaattcctgagctcaagtaatccacccacctgggcctcccgattacaggcatgagccactgctccttttttattattattattttttctcatcttctttgtgatggtagaaacaatacttttaaagtgctaaaagaaaagagctgtgaacccagaactctatatccaatgaaaataactttggaatgaaggcaaaataaggacattctaacaggaaaaaaaagaattattctttactttaacagaaatgctagagaaagttctttgggtggaagggaaatgatgccagagggaatcttggaactttaggaatgaaagaaaaacaacagaaatgttaaagatgtggcagagtaagaccctgtctcaagaaacaaacaaaaagttgaaattgtcatacatatcttaaagctgtaacattgtcagccaggtgcagtagctcaagcctgtaatcccagcactttggcaggccgaggcaggcggatcacctgacatcaggagtttgagaccagcctgaccaacatggtgaaaccctgtctctactaaaactacaaaaattaaccgggcatggtggtacatgcctgtaaacccagctactcaggaggctgaggcaggagaaccacttgaacctaggaggcaaaggttacagtgagccgagatcgtgccactgcactcctgcctgggcgacagggagactccatctcaaaaaaaaaaaaaaagaaaagaaaacgccaggcgcggtggctcacgcccgtaatcccagcactttgggaggccgaggtgggcagatcacgaggtcaggagatcaaaaccatcctggctaacacgatgaaaccccgtctctactacaaatacaaaaaattagccgggcgtggtggtgggcgcctgtagtcccagctactcgggaggctgaggcaggaggatggcgtgaacccgggaggcggagcttgtagtgagctgagattgcaccactgcactccaacctgggcgacagagtgagactccgtctcaaaaaaaaaaaaaaaaaaattatctagtagggttttcagcatatatcagtgtaatatatttgacaactataatataaaaggggatagggtaaaaaatataatggtaagatttctaccttctactggaaatgtaaaataggatttctaagtagactgtgaaaagttgtgtgtgtgtgtgtttgtgtgtgtgtgtgtgtatagtaatttctaccataaccactgaaagaagactacaagccaggcacggtgtagtgcctgtaatcccagcactttgggaggctgaggtgggcagatcatgaggtcaagagattgagaccatcctggccaacatggtgaaaccctgtctcttctaaaaatacaaaaattagctaggcatggtggtacgtgcctgtagtcctagctacttgggagggtgaggcaggagaattgcttgaacccgggaggcagaggttgcagtgagccgagatcatgccactgcactccagcctgggtgatagagtgagactccatctaaaaaaaaaaaaaaaaaaagactacaaagatatgtgatcaaaaatgctagaggtaaatgaaaatggagtattaaaaattactcaaatcatcaaaagatattttgattcaaaatattcaaaagaggagggggagaacaaaaaactaaggaccaaatagaaaataaataataacattatagacttaagtccgtacatatcaatagttacattaaatgttaatgacccaaacacatcaatgaaaagcagagattctcagaatggattaaaaaacaaaaggggctgggagctatggctcacacctgtaatcccaacacttcagggagcctgaagcaattctcctaatcgcttaagcataggagtttgagaccagcccaagcaacagagcaagatcctttcactacaaaaaattttatagaaagcagccaggcatggtggtgcatgcccatagtctcagctactcaggaggggctgaggtgggaggatcacttgagctcaggaggtcaagtctgcagtgagtgctgatcatgccactgctctccagcctgggcaacagagcaagaccctgcctcaagaaataaacaaaaaaccataaggcctaatatatactgtctacaagaaacccattttaaatataacaatataggtaataagttaaaaaccaaaagtataaaaagatataccatgtaaaggctcaggaaaagaaagctagggtggctatattaatatcagacaaagtagacttcagaggagggaatattagcacggatagagagggacataatattatcataaatgagtcaattcatcaagaaggcataatagttctaaatgtgtacacatccagcaacagaccttcaaaatacatgaagcaaactttgatagaactaaaaggagagaaggtcaaatctacaattattgttggagactctacactcatcttttagtaatagatagaactagtagatagaaaatcagtaaggatatagaactaaaccagaccaaaacccaactagatctagttgatgtttatagactcttctacctgacaacattagaatacacattcttttcaagtacatattgaacatacacccagatagaccatatcctgggtcataagacaaaccttagctaatctaaaagaattaaaattctataaagtatattttcagaccataatagtattaagctacagataggtaatacaaataaaactggagaatacccaagtgcttggaagttgaacaacatgctgcttttttttggaaacagagcctcgcgctgttgcccaggctggagtgcagtggcgcaatcttggctcgctgcaacctctgcctcctgggttcaagcaattctcctgtctcagcctccctagtactgggattacaggcacgtgctaccacacccagctaatttttgtatttttagtagagatggggtttcaccatgttgaccaggctggtctccaactcctggcctcaggtgatccacccaccttagcctcccacagtgctgagattacaggtgtgagccaccgtgcccggccctgaacaacacacttctaactaatccatcgatctaagaggaagtcttaagggaaaaaatattttccactgaatgaaaatgaaaatgcagcatatcagaatttctgggatgcagccaaagcaatgcttagaggaaactttatagtattaaattcttaccttagaaaagaagaaaggtctcaaatcattctcatcattattttttgagatggtgtcttgctctgtcacccaggctggagtgcagtgatgtgatcttggctcactgcaacctccccctcccaggttcaagtgattctcctgcctcagcctcctgaggaactgggattataggcatgcagcaccatgcctggcacatttttgtatttttagtagagatggagttttaccatgttggccaggctggtctctaactccccacctcaaatgatctgcctgcctcagcctcccaaagtgctgggattacaggcgtgagacaccgcgcctagcctcaaattattaatataagctcctcccttaagaaactttaaaaaaaaaaagagcaaaataaacctgaaccaaacagaaggcagcaaatagtaaagagcagaaatcaatgaaactgaaagaaggaaacagtagcgaaaaatcaatgaaactgaaagaaggaaacagtagcgaaaaatcaatgaaaccaaagctggtttttcagaaggattagtaaaactcataaatgtctggcaatactgacaaaaaggagagtgtacagatggagttgtcactataaaccccacagacatggaaggataattaaaaaaaaatacaaagcagaccgggcgcgatggctcatgccatgtaatcccagcactttgggaggctgaggcagatagatcatttgaggtggggagttagagaccagcctggccaacatggtgaaactccgtctctactaaaaatacaaaaattagctgggcatgatggtgggcgcctgttatcccagctacttgggaggctgaggcaggaaaatcgcttaaacctgggaggcagaggttgcagtgagctgagattgtgcaactgcactccagcctgggtgacagagtcagactccatctctaataataacaataataataatagtaatacagaccaggcatagtggctcacagtggtaatcacaacactttgaaaggccgaagtaggaggattgtttgaggccaagagtttgcgaccagcctgggcaacatagcaagaccccatctacaaaactgcaacaacaaaaaaatcagcctagcctgatggcacgtgcctgtagtcccagttactctggaggctgaggtgagaggattgcttgagcccaggaggtcaaggctacagtgagctgtgttcgcaccactgtactctagtctgggtgacagagtgagaccctgtctcaaaaaaaaatagagaaaaatgcaacataaccaagtgggatttccagataggcaagactgatttaatatttgaaaatcaggccaggtgcagtggctcacgcctgtaatcccaacactttgggaggccaaggtgggtggatcacctgaggtcgggagtttgagaccagcctggccaacatggtgaaaccccgtctctactaaaaatacaaaattaactgggcatggtggtgcatgcatgtagctacttgggaggctgaggcaggagaatcacttagaacccgggaagcagaggttgcagtgagctgagattgcgccattgctcacctgcctgggcgacagagcgagactgtgtctcaaaaaaaaaaaaaaatcagttaatgtaatctatcaagttaacagtaaaaacgaaaaactatgtaatcatatcagttgatgcagaagaagcattcaacaaacttcaacatccattcatgttttaaaaaaactcttagcaaactaggaatagatgagacttccttgatctgataannnnnnnnnnnnnnnnnnnnctagcctgatggcacgtgcctgtagtcccagttactctggaggctgaggtgagaggattgcttgagcccaggaggtcaaggctacagtgagctgtgttcgcaccactgtactctagtctgggtgacagagtgagaccctgtctcaaaaaaaaatagagaaaaatgcaacataaccaagtgggatttccagataggcaagactgatttaatatttgaaaatcaggccaggtgcagtggctcacgcctgtaatcccagcactttgggaggcagaagggggtgggtcacctgaggtcgagttcgataccagcctggttaacatggggaagccctgtctctactaaaaatacaaaaattagctgggcatggtggtgggcgcctgtagtcccagctattcgggaggctgagttaggagaatcgcttgaacctgtgaggtagaggttgcagtgagcctgagatcttgccactgcactccagcctgagcgacagagtgggactctgtctcaaaaaaattaaaaagctccaaattaaatacttaggtataaatctaatgaaatacacaatacatgtagtatctatatgccaaaaactgctgatgaaagaaatcaatgaagacctgaataagtggagagatgtactgtgcttatggatatgaagactcaataacatgtcaattctccacaagttaataaatgtataaatttacttcaattgaggattttttattagacatagacatgctgattttaaaattcaaatggaggccaggtatagtggcttacgcctgtaatcccagcactttgggaggccacggcgggaggactacttgagcccaggagtttgagactatcctgggcagcatggtgagacctcatctctacaaataataaattagccatgtgtgatggtgcatgcctgtggtctcacctactcaggaggctgatgtgggaagatcacctgagcccaggaggttgaggctgcagtgagccatgatcgtgccactgcactctagccttggcaacagagtgagacctcatttccaaaaataataataataatttaaaaattcaaatggaagggtgaaggaactagagtagcccagacaattttgcagaagaataatgtggaaggaagtacagcacccaatttttcagaattgctatgaagctgtacagttctcaagactgtgatatctatgaagagatagacatatagaccattgaaacagtatagagaatccagagatagatccacacaaatatgttcaattgatttttgtcaaaagtgcaaaggtaatcagttcagtggtggaggaaggatagttttttgttgttgttgttgttttctgtttttttaagacggagtcttgctctgtcacccaggctggagtgcagtggtgggatcttggctcactgcaacctcggcctcccgggttcaagtgattcttctgcctcagcctcccgagcagctgggactacaggcgcactctaccacacccaggtaattttttgtatttttagtagagatggggtttcaccgtgttagtcaggatggtgttggtcgcctgacctcgtgaactgcccgcatcggcctcccaaagtgctgggattacaggcatgagccactgcacccgccccaggatattctttttaatgcattgggacaaccggacatccatgtgcaggaaagtgaacttcaacctaaacctcacaccttaccccgaaactagaaaggatcatagatctaaatgtaaaacctgacactgtaaaacttctagaagaaaatgtaagaggtccgggcacggtggctcatgcctgtaatgccagcactctgggaggtcaaggcgggtggatcacctgaggtcaggagtttgaggctagcctggccaacatagtgaaaccccgtctctactaaaaatacaaaaattagccaggcatggtggtgaatgcctgtagtcccagctactcaggaggctaaggcaggagaatcgcttgaatccaggaagcggaggttatagcgaaccgagatcacaccactgcactccagcctgggcgacagagtgagaccgcgtctcaaaaaaaaaaagaaaacataagagaaaatctttgtgatcttggatgaaagcttttagctatcagctgagtatggtggctcacgcctgtaatcctagtactttgggaggccgaagtaggaggatcacttgagcccaggaagtcgaggctgcagtgagctatgactatgccactgtactccagcctgggtgacagagcaagacattgcctctgcaagggggaaaaagaaacctcttaaatataacaccaaaactcaatgcataaaagaaaatattgataaattatacttcatcaaaattgaaaatttttggccaggtgcagtggctcacacctgtaatcccagcactttgggaggccaaggcaggtggatcaccagaggtctgaagttcaagaccaacctgactaacatggtgaaactgcatctctactaaatacaaaaagttagccaggcatggtggtgcatgcctgtaatcccagctacttgggaggctgaggcaggagaattgcttgaacccgggaggcagaggttgcaatgagccaatattgcaccattgcactctagcctgggcaacaagaacaaaactccatctcaaaaaaaaaaaaaaaaaaaaaaggaaaagttttgttctgagaaaactagttaagaaagtgaaaagaccagcaacagactgggagaaaaatacaggtatttggaaatcacatatccagcaaattactcatatttagaatattcaaagaattttaaaaactcaggccgagcacggtggctcacgcctgtaatctcagcacgttgggaggcttaggcaggtggattacctgagcccaggagtttgagaccagcctaggcaatgtggcgaaaccctgtttctactaaaaatataaaaaaattagccgggtgtagcagtgcacgcctgtagtcctggctactcaggtggctgaggcatgagaatcgcttgaacccaggaggtggaggttgccagtgagccgagatccacgccactgcactccagccatggggggcagagtgagaccctgactcaaaataaataaataagctgggcacagtggctcacacctgtaatcccagcactttgggaggccgacgcaggcagatcacctgaggtcaggagttcaagaccagcctgaccaacgtggagaaaccccatctttactgaaaaaacaaaattagttgggcgtggtggcgcatgcctgtaatcccagctactcaggaagctgaggcagaagaatcgcttgaacccaggaggcggaggttgcggtgagccgagattgcgccattgcactccagcctgggcaacaagagtgaaactctgtctcaaataaataaataagttaattaattaaaattaaaactcaacagtaagaaaacaacccaataaaaactgggcaaagacaagatatgggatggcaaaaaaaaaaatcacatgaagacaagcgtggcatgattagtcattagcacaatgagatgccacagcatacctattagaatgattaaacttttaaaaacaaaaactgaaagtacaggtgctgggaaagacaggaagcaactgtaactctcacattgctgtttggaaaacaaagtgatagcgctactcaagggaaaaggtctggcagtttcttaccaagttaaacatacatttaccatataacccagcatttctactcctgggtctttacccagaagaaagatagacttatgttaaagaaaaacctacataggagtgctgatagtggcgttattcattggcacatggatcagtgttctccaggagctagattagggctgagtcagtaagcttccttgcagatggagtccctgtctggatctgcaaaggccacctgtcccagccctagctgttttatactaatagattcatttgagcaagacctagagctcatccactgtcccacaccgtgggctgatggacacctgctgtgagctgattcagctccctcagcacactttccatggccaaagatcgtcagttacactgagggcaaactaatcgtcgtgattggggtgagcataggtttctgctaaatgatgcctggacctttgtaccagaaaaaaacaaggctatgagccttactactagctgggtcttcaggaatttttagctagtctagcaacatgactcgtcattatgcacaaatactaatcgcaaaacttagtttgaggaaataatggtgatgttcctttacagatcttatcaacatttctatgaacaaaactttgacttggtttctgtttcagatcacaaaaatggacagcactttataatacctcaaatggcagacaggtaagctcattgaaataccagttagttttgtctatcgctaatatttccttggttgtattatgtttaagtatattatattttgtgtttaacaaagcccatacatttttctcttttatggctataccatttggaaataagacggctgtaagtaaaccactatataaaacttaagtttcaaagagcacaagtagcaattttactaataggaaaattgaaaccagtgatattgtcactgttttagccagttgtgacagtattttgtatttatttatttacagaatacttctgtattataggagattacattatctatgacaggggttggcagacttttcttctcaagggccaattaataaatattttagactttgtgggtaatatggccgctttcgcaacagcttaactctactgttgtagatgaaagcatctgtggacactctataaatgaatgggtgtgtctattccagtgaaattttatttctggacactgaaatttgaatttcaaatagttttcacgttatgaaatattgttttttctttttgcccccaaacattttaaaacgtaaaaaccattcctagctcaactgaacaaaaagaaggccataatttttctgacccctggtctataagagcagatgagttcattgctacaggaatgatccttaaacccttgttttgcaagttacctttgcacggaaactgtcaagagtttatgaaatgactaactgctattccagatataatcttgccatcctgatcttttacatcttccctttttgttttgttttgttttgtttttttttgctttggtagagacagggtcttgctctgttacccaggctggttgcaaactccgggactcaagcaatccacctgccctggcctccctatgagcaactatatctggccttgtattttnnnnnnnnnnnnnnnnnnnnnnnnnnnnnnnnnnnnnnnnnnnnnnnnnnnnnnnnnnnnnnnnnnnnnnnnnnnnnnnnnnnnnnnnnnnnnnnnnnnnnnnnnnnnnnnnnnnnnnnnnnnnnnnnnnnnnnnnnnnnnnnnnnnnnnnnnnnnnnnnnnnnnnnnnnnnnnnnnnnnnnnnnnnnnnnnnnnnnnnnnnnnnnnnnnnnnnnctggccaagatggtgaaaccctgtctctactaaaaatacaaaaattagccaggcacagtggcgtgtgcctgtaatcccagctactctggaggctgaggcaggagaattgcttaaaccctggtggcagagattgcagtgagctgagattgcgccactgcactccagcctgggtgacagagtgagactccatctcaaaaaaaaaaaaaaaaaaacaaccctgaccttgtgatcctcccacctcggcctcccaacgtgctgggattataggcgggagccatcgagcccgacatattttcttatatcatgctttttttttaatacttcaaaaattgtgactcctcacataagggcctggaaggtaacctggcaatagcttttgtcgtttagttggtggacgatttttttttcctctttaacacttacatgattgtggtatttcagaaggagttactttcaccagattgttctgtttagagctcctcactgactctactgggctgtagaatgcttggttctaacatggtccatgaactgtaattaatatttttatctcttgggtgtcttaaactttacagagttcacaagtctggctttatttatttgcttattagctttgtatgttttcttagcagcctggatttgtctgaattggcaaaagctgctaagaagaaacttcaatctgtgagtatttctctgtactggttttctctagtatgagaatcagtgcaccctgctgatacctactctgaatgcaggttacctattgcgtctgatgactttatttcatacttttatttgttaaactagaagcagactgttgagtatacagcagtgatgaccacaaggactattaagttcagtatattcagttcattggttctgcttcagataatctcatttttctctatcatgtaacaagtgcagatggcacctttggcattaggcagttgttctcctcaggagagttccctagttcctctcagtgtcatgagtaagtagggcacgcgttcttggggtgacttagccatgtagggttctagagctggtaaatgctgatgctgaaatggtggcgagtcccatagattcactggctgccatttggatccagccatattgtaaacctctttcccatcccatgccattcatcagtgctttttaaatttctgctgttaaaagctggtggtcttggcccatgtgcgtgctcagagtttgccggctctgtgccacaacctccctttagcctgtgtctttcttccagactgcccacctcagccttaggaaaggcctaagggcccaaggcctcaaggccctgggaaatctacttctctgggattgacttctctttgtctagttctctcacatgaagcctcaccggggcacttctctccactttaaccaccaaagtatactcctcagctgttcccattgctctttggatcagaaccaagattcttaacttctttttgtaacctgtaagggcatcattcagctctcacctttcagagattgccctgcttcccatctggttccgtgtgtgtgtgtgtgtgtgtgtgtgtgtgtgtgtgtgtgtgtgtgtgtgtgtctttagattaacaccctctgaggccatgagctgcacattcaagtcctcttccaggaatcctcctttgcctacagcgtttgcctttcccagcttccatctctctgattcaaggacctgaaatctgaccagtgtaggtagcggctttcccaaagcctgactctgacattgcagcttccctcatttatgactttctcctcatttctgttttcacagaagaccctttactaaaacttcatataatactcagtattaaatattacattaaatgaatttatccttactagtatttaactgtattatgaaataaatgtgttttatgcaatttgtttggtgtctctgtgttctgtatctacagttttgtgtgtctgtgtgttttattgccttaaggaagttgtaaactaagatgatcaagatgataagctttggagtcagatagcactaaatattgtgtgatttccttttaattactcacaatctgtaagtaaattttattataaataattcaaacctagataaaaacccacgttttcttagactatcctacatttgcttcactggaagctgcatgaaagctgagattatgcttgtaatatctctagcacgtggcaggcatgaagtaaagacctggaacagagtctagtatagctctccagagctgcagctctgagtcagactggtcagtacatatctcagccctgccaagcttcctagcctccctgtgccttggcatcctctcatagaagagggagataaggatcctgcaggggctgccggccagaactgctcagagtgggctgccccattacttgttgaccctcaccctgtggtctccttctcataggtgaccatcttatcagcgccaggtcagtgtttatcctccagtatcttcctcctgtcctccctctcttcctcccttcatcctttctttcctttctcttttccttccctccctcctgatgaagaactgagagaaatataacaaaggctaatgtattccttgaatgagtaaatgttagcattttcaaagatgtaaacttggatctcaggtctgtcactagctttgtgactttaggcaagctactatcttctctgcctcagttttcttgtcttaaaaatgggacaatagtagttcctgttttcatagaggtgttataagtgaaatatgatactgttagcacagtgcctgggatataagcccataatcagcgttggccattgtagttgttgctagtaataataacattagcttgtagtcccatggaggaagaaactagatatttatgaagcaaagtcaagctcccaatccttcaacatcttgtctagcaacaggctctctgggtttgtttttaattatagtgcgaccacatttgggaagatttggaaaatagagaaaggggaccatcctcattgctatactcttaatggagtcaggctcaatattttggtacatttctttcagttcttgttttatatgcatatctttttttaaaactggaacttaatcataattgtagacgtttataacctgcttttttcactcagtaatatatggtacccattttaacatgttcctatgaggtctctgtaaccagcacttgttttttctttttttttcgagacaaggtctcactccgtcacccaggctggcgtgcagtggtgccatcgtggctcactgcagccttgaactcccaggctcaagtgagtgatcttcctgcctctgcctcccaaagtgttgggattataggcatgagccaccacacccagcctgtagccagcattttaaattgctgcattaaatcccttctggccagccagtgcctcttttctggccacttttaaagtgtgaggtaccatgtgtggatgtaaggaacccaatagggaatataacagattcagcatctgccctcccaaagcagatgtcagacagtttaagagtcacaactaccacgtgtcaaggtgttgcatgaggcagaaagtgcagagagaggcggagccaccccagaagaggcttaacctcatctgggccaggaagacctcaattatcctccatgtgcccagggaggcactgcaggctgtgaggtggttgttgtgtgctgaagagtcaggctgtgctttggtaggaagcttccttctggagactgaagcagtaggactgctactgagaaagagagcaaagaaactcagctgaggtctgagtcacgtttttgtgcaagggcacattttatcctctcaaaacagcatgtcttttgcttttcttttttcttttttgagatagggtctcactctgtcacccagcctggagtgcagtggtgtgatcttggctcactgcagccttgatatcctgggctgaagtgatcctcctgcctcagcctcctgagtagttggcactacaagtgtgcaccaccacgcccagctagtttttgtattttctgtagaggcagggtttcaccatgttgcccaggctggtctcgaactcctgggcttaagcaatccacctgcctcagtctcccaaagtgctgggattataggtgtgcaccactgagcctggctgtttttgcaaggttataggttcccttatactttggggaactgataagcacttttaagtgcagaaaaggaggcttacaggatgatatcacaagaagagtagagaactggaacctacttctgagatgatgcactttagatgcctcttagctccttaatagcagcagctctgtctgtgtcataaagtagtgaaattgctgtggttggcagacatttctagaggccctgtacgattttgaaaatgttatgtctgtttaacagtgggtatgtaccaagcactggcattggataagacgtaggcaataaaagggtgactaagtcgcagttccctcttgtcctcctggcattaatcattgtcccttgtgttcctgatattttttattttcagctaagtaatcatttgtttgaagaacttgccatggatgtgtacgatgaagttgacaggcgagagacggatgcaggtgacttgacgtggctttatctaataagcttctgttatcagtgggcagtgaaaagctgccaggctcagtgttttactagtccaatttctgctgtcctgatggtgcgagtgtcgacgtttgcctttgcgtgtgttggcttcagagtgtgtttcccctcgtagtgcgtgagctgtgcctcccaggagcagtggcacacaggcgtgatgaggtttgtctctggctctttcctctgactagtctggcttgccacgcaaaaccacagcgccctggtaaccgagacaacggtcgtcccctttcttccggtcaatcctgagtactcatcaacacgaaatcaggcaagtggctcagtttggaaaggaatagtagttggggaatggctgatgtcatgtttcatttttcccaggaaaactattctaaatgttttgattgattaaaatttaatatcctttatacatatatacacacacaacccccaaattgataagaaaaacaatagactataaataaatgactgggaaagaatatgaaacaattcacagaagaaatataaatggcttacaaatgtgaagaaatgtttaaccttgtcagtaatctaagaaagcaacttaaaagcattagtgcaagttttatcagtcaaattaataaaatatataataaaggatactccaaactggtaaggatgtggtaagctgagctttctcttgcaacagatagaactttaaattgctgtagatgttagaaaagcaatttgtttaccagtttcagaagcctcaaaattaagtacatccttttacatgggaatttctcatttgagaatatgctctaataaaataaaaatagatttatgcacgtgattttcatcaaagcaccattgtatacaatagagcattaaaaacagctaacacatccatcaagaggagaaatgttgaatgaattatgaaggtgttttagtctttataattagcagctatatataaggatagggaatatctagactatgattttgtttaacttaaattttttttttcttttgagacggagtcttgctctgttgtccaggctagagtgcagtggcaccatctcagctcactgcaacctccacctcccggacccaagcgattctcttgcctcagcctccccaagtagctaggattacaggcacccgccaccatgcctggctaatttttgtacaaagtcctgacctcaagtgatcctcccgcctcagcctcccaaggttctgggattacaggcgtgagccactgcacccggccttaacttaaaatttaaaaattcccctcaaaattaatttattattactgggtctacttccaaactgaagcattaatagaagaaaagcattcagtagacccattttatttttgcttaccaaaatagacctgcattgtgagaacaatgcatatgtgagaaatgccataacatttgttatgaaattctcttatataaatggttttaaactgttcatatggaaaacaagcattaacttggtttgattatggctgggattaattgtactttgatcatgccagaagaaagtatttgcagaagtctgtcaatagtctgactagttttatgtgactatttatgtatatatttttacactgggaaatatttccaattattttcccacctttagggcagacagaagttagctcggttcaacgcccatgagtttgccacgctggtcattgacattctcagtgacgccaagaggagacagcagggcagttctctctcgggttcaaaaggtaactgctcaaacctccaaacacttgcattttttggccctctaaatttgactcaggtgttaaagttataaactaattaaagcagtcatcaacatgacagttctataggtttttggttttttgtttgtttttttactttaagttccgggatacctgtgcagaatgtgcaggcttgttacgtaggtatacgtgtgccatggtggtttgctgcacctattgacctgtcctctaggttccctcccctcagccccacccactgtaagttttattggtagtatattgtgataaatagtttacctgtctgagccctggtgaattaacaatatttcagagttattaactgctacacatatttatcttatatatgatttctgttttgttttgggacacttaacctaccctgtaaaattgcatcctgaaattaacccaaaactctggcttagatcttgttaaaggacataagaaaataaactcttcttggccgggcgtggtggctcacacctgtaataccagcactttgggaggccgaggcaggtggatcacctaacgtcaggagttcgagaccagcctggccaacatggtgaaaccacctctctactaaaaatacaaaaattagcaaggcatggtggcgggcgcctgtaatcccagctacccaggaggctgaggcaggagaatcacttgaacctgggaggcggaggttgcagtgagccgagattgcaccactgcactccagcctgagtgacagagcaagactctgtttcaaaaaaaaaaaaaaacggaaaagaaaaactcttcctgattgaaactgcataatatctgctgttgcttacctacaaaactgagttcaacataattaaaatttgttgccataaactttaaatgtcttcagtgagaattactgtgatatacaattataaggagagctctgagcatctgtttcaccagtgccctgttgagtctagttcagtagcccaggtcctgtctgcatgcttaggaatgtccttcctctccagccctattactgtatccatattggttttttctaattatagaaattagacgtttttcattgtaagtcatttaagcaaaagaaatatgtaccataaaaattaagttttcagtcagtatcacattccccaaagacagtaatcattaactgacaacaactcattcattcttctttcctgttcaggaatttgattttatctgttcaaccaggaataaggaagttctgaaaaggtttattaaattttggtgaaggcacagtgacaagagtctttggataagtttaaagtcttaaaatggcctgggcgtggtgccttacgcctgtaatcccagcactttgagaggctgaggcggacagatcatttgaggtcaggagtttgagatcagcctggccaacatggtgaaacccatctctactaaaaatacaaaaaaattagctgggcgtggtggtacgcgcgtataatcccagctactcaggagactgaggcaggagaattgcgtgaacctgggagacagaggttgtagtgagccgagatcacaccactgcactctaacctgagcaacagagtgagactctgtctcaaaaaaaaaaattgggggccaggcacggtggctcacacctgtaatcccagcactttgggaggctgaggtgggcagatcacgaggtcaggagattgagaccatcttggctaacatggtgaaaccccgtctctactaaaactacaaaaaattagccaggcatggtggtgggtacctatagtcccagctactcaggaggctgaggcaggagaatggcgtgaacctgggaggcagagcttgcagtgagccaagattgtgccactgcactccagcctgagtgacagagcaatactccttttcaaaaaaaaaaaaatttttaacttaaaaaacaaagtcttaaaaaatacctgctctttgatttgataattccactcttaggtattaactgaagggaaatcatcagagatgttatatgtagaacaacacaaacattagaagcaactaagtaataaagaggaacaattagtcacattttaaaatagtacatgctgcactttgggaggccaaggcaggcggatcacgagttcaggagatcgagaccatcctggctaacacggtgaaatcctgtctctactaaaaatataaaaaattagctgggcatggtggcagacgcctgtggtcccagctactcgggaggctgaggcaggagaatggcgtgaacccgggaggtggagcttgcagtgagccaagatcgcaccactgcactctagcctgggcgacagagcaagactccgtctcaaaaaaaaaaaaaaatacatacttatctttttttaaaagaatatgtaattgtcttagtcccttttgtgtggctataaaagaatacctgagactgggtagttcgtaaagaaaaaaggtttatttggctaatgattctgctgactggaggattgggcatctggtgagaacctcaggctgcttccactcatggaaggtgaaggggtgctacatgtgcagagatcacacggtgagagaggaagcaagagagcgaggagggaggtgccaggctcttttcaataaccaggtcctagcaggaactaatagagcgagaactcactacaaagggagggcattgatcagttcataaaggatccacccccatgacccaaacacctccctttagtcctcccctccaacactgaggatcacatttcaacatgagatttggagggaagaaacatttatactatagtagtaattatatgagacaaagtaataaagtttgattttgttttgtttttttttttttgagacgagtctcactctgtcgcccaggctggagtgcagtggcgcgatcttggctcactgcaacctctgccacccaggctcaagtgattcttgtgccttagcctcctgagtagctgggattacaggtgtgcaccaccacacccagctaatttttgtattttttagtagagacggggtttctccatgttggccaggctattctcgaattcccagccttaagcgatctgcccacctcagcctcccaaagtgctgggattacaggcatgagcccccatacctggccaaataataaagtttttaaaaggttttgtataaccccagttttgtaaggaaaacatatttatgtaaatatgtgtgtacaagtgagtataccacatgtaaatataaatacacaattgatcctcatgtgcacatcccatatttacaaattcatctacttgctaaaatttgtgacctcaaaattaatacagcattttcaaggtcattgtaagaaatgtacagagcagagaaaaaaattgagtcaccaaaagcacatgtttccagctgagattgaacagggaggagactccttgacttcttgtttctgcactcatgctataaacaagtgtctgtggtctatttagtgccatgttagtcatatttgtgtgcttttcattggtcatttcactgttttaaaatggccccctaccgcccaggatcaattgagtgcccaggagattgaggctgcagtgagccatgatcacgtctgcaccctagcatgggtgaccctatctcaaaagtgtctccttggccagacgcagtggctcacgcctgtaatcctagcactttgggaggctgaggtgggctgatcacgaggtcaggagttcgagaccagcctgaccaacatggtgaaactctgtctctactaaaaatacaagaaaaattagccaggcatggtgacgcgtgcctgtaatcccagttactcaggaggctgaggcaggagaatcacttgaacccaggaggtggaggatgcagtgagctgagatcgtgccactgcactccagcctggatgacagagtgagactccatctcaaaaaaaaaaaaagtgcacacctgaacaacatagcaaggccccatctttaccaaaaaatttaaaaattttctaggtgtgttggcatgtgtctgtagtcctacatactcaggaggctgaggcaggaggatcacttgagcccaagagttagaagctatagtgagctatgattatgccagtgcactccagcctgggtgacatagcgagaccctgtctcaataaaaaaagaaaaaaagtggcccccaagcatagtcctgaagtgctgtctagtgtttctaagtgcaagaaggctgtgatgtgccctacggagaaatgtgtgttaaataagcatcattcaggcatgatttatagtgccgttggccatgagttcaatgttaatgaatcaatactatgtattaaataaggtatctttaaacagaaacacacgtagaacaaggttatatattgattggttgataaccccagaagcactgatctaatattggccaagtcacagcaactttttagaacataactaccaagaggctgggtgcggtggctcacacctgtaatcccagcactttgggaggccgaggtgggcagatcacgaggtcagaagatcgagaccttcctggctaacacggtgaaaccccgtctctactaaaaaaatacaaaaaaattagctgggtgtggtggcgggcgcttgtagtcttagctactcaggaggctgaggcaggagaatggcgtgaaaccgggaggcggagtttgcagtgagccaagatcgcgccactgcactccagcctgggcaacagagtgagactctgtctcaaaaaaagaaaagaacataactaccaagcataacaagaattgactgtgtgtggctataagtgctcggagaaaaacctagaaatagatcaacaaataacaatggctataagtgattatcttacttgttcattagtttctaaattgaatatattgactatnnnnnnnnnnnnnnnnnnnnnnnnnnnnnnnnnnnnnnnnnnnnnnnnnnnnnnnnnnnnnnnnnnnnnnnnnnnnnnnnnnnnnnnnnnnnnnnnnnnnnnnnnnnnnnnnnnnnnnnnnnnnnnnnnnnnnncctttattattattattattttttttttttttgagacagagtctcgctgtcatccatgctggagtgcagtggcatagtcttggctcactgcaacctccaccttctaggttcaagcgattctcctgcctcagcctcccaagtagctgggattacaggatgtgcaccaccacgcccagctaatttttgtatttttagtagggatggggttttgccatgttggccaggctggtctcgaactcgtgacctcaagtgatccatctgcctcagcctcccaaagtgctgggattacggatgtgagcccctgcgcccagctaggacctagtctttttaaataaccaccattcatcacccagatatcatccatccattgtttcctcaacatctctgggaaacaatattagaagtcagagtttgagttgcctgaaagaaatcagagagacttgggtagtttgtgaaatcttttgttcaaagtgtattagatcctctagaataatccctgctccctatgggatagacactccctgtaacatgcacatgtgtatttgtttgattcattctcctttatctctttctctcgctgagatgcaggtaattgactaaatgccaatgtttctattcttttttttttttttgagacggagtcttgctctgtcgcccaggttggagtgcagtggcatgatcttggctcactgcaagcgggttcatgccattctcctgcctcagcctcccgagtagctggggctataggcgcccgccaccacacccggctaactttttgtatttttagtagaggcggggtttcaccatgttaaccaggatggtttcgatctcctgacctcgtgatccgcccgcctcggcctcccaaagtgctgggattacaggcgtgagccaccgcgcccggcccagtgcttctattgtttgagtgcctaggttctggctccagtttaacaatttgctttctgttttgagtgacattaccttgtaaatatgttataggtattcatagaattacagtttatcttccattacctacagccttatcttcatgacctggagctaggctctatctctagaaacttgggaacctgccttctttatctgagcagttccttcctaagccatctgtttaatttgcccatatttggcaggtagatgagaggaatgctggagtctcttatgtagctgtccacctggttgaaaactttttctgttatctctgtattggtgtgaatataacgttgccatttctgtcattttttttcagtccttgttcattttgtttttgtctttgtttttgctcttagagacagggcctcactctgatgcccaggctggagtacagtggtgcagtcatggttcactgcagcctcaatctcctgggctcaagcaatcctcctgtcttagcctcctgagtagctagtagctgggactacaggcctgtgacaccaggcctggataatttttaaattattgtgtagggatggagtctcattgtgttgcctaggtaggtctcaaactcctggcctcaagcagttctcctccttggcctcctagaatgctgggattacaggcaagagcacagcattcagccctttaagtcctttaaatggctaaaccaaaaaatcctctccgtagttttttggaagaaaagcaatgttttaagcctgaagtaaagttgtttgcttttattgatagacaatgtggagctcatactgaaaaccatcaataaccagcacagcgttgagagtcaagacaacgatcagcccgactatgacagcgtggcatcagacgaagacacagatttggaaaccactgcaagcaaaacaaaccggcagaaggtgagaggccatgcgtcccatggaagggcaagcacgcatcagctgagggctagccctgccaaagctgctgtgcagtgaggttgggtttgttactagctcaggccaagcaaaggtgaaacaaggttaaatggttttaaaatagggatccttgtccctgcatcacagccctgctgcagttgagactttataaaacttgtgaggagtgattggtgtgttttattcattcaacaagtgtttactgagtgacttctctggatattactctcctgaatgaggcctcgtccctttcctgtgaggctctcattgcctaggagagagagaactgcggagaaggcacaaagtgatgtgtgtcatacgaagcacacacaggctgagggagtgagcagagagagaatctatggctgggagcatcaggtggggctgtgtcataggacagctcttaagatgcgcctcaagggacgcttgggattggggcatgtggaggagtcagaaagaaagtgaaaccagggcatctaaggggaagctggtcatgcatagggacagcctaaaaaggttgggactcgaagctgcagcaggaggggtatgacacccgacggaagagagtgggcctcacaggcagtgcagagcccaggatgccatgtctggggaggactcttctggtgggttagagagtggagggagagatccatactggagctgatgcaggccacctaaggacccatgctaggatggtgcgggtgggagagacctcggcaccagagtgtgagctgggggagagggcagcaggaccccaggctgtgcaccctctgctgacccccaggacacacccacagaggggcttggcaatcatttgagaatggatgaataggaaggtagaatagaaaagtcttggcaataagtcggaaggttgaagtggggagacagatttatagaagatttgtttggagttcttcggcccacatgactgtgagaaagatggcgtcattagcagatgcaggggacacccctgcgcagacttcccggaagccacctggttcactcagtgagagccgaggtcattccaagaccctctgtgaccaggccctctgtcaaccgcctggcctcctgcccagtccatcccacacacctgctccctctagctgagctccactgcaggctggaatgttcttcctccagattcatgtgactcatcccctcacctcctggggctctgctcacctctcacccactcacaggcttaccccagctccccgcttaacatgcagccccctaccctgctctgtcttatcttttcccacagcactcatcaccctcaatcatgcaatatatatactctctcatgctgttggaatataaacaccatggaagcaggaatctttgtctcttttctaatatatcccaagcacctagaacactgcctaatgttcaatgaaaatgttggaatgaatgaattaatgaaagaatgaataaaaacaaaacaagagtgaacgagagaaaggcttacaagacaggacagacctccttagacagtcattgtcagcatagatgtgtagcctcactgcctgttctattagaaaatactgactttcaaattttttaaatagtatagtgaccctacttttatgttttagttttgcattactctcagaggccttgatttggtttgactaactttgcaattcagctggcttggtcagaatttgaaattcttgagctgttagtctttaatgttctcgtcatctcagattgtgaacgttttcccaatttatttttagagcctagattcagatttatcagatggaccagtcactgtacaggaatttatggaggtcaaaaacgctctagtggcttctgaggccaagatacagcagctaatgaaggtgaataacaacttgagtgacgagctgagaattatgcagaaaaaggtaacatgttaataaatgccaggacggttgacgctttaatcccatagtacaaggaagaatctcaggcactgtgatgtggtccgaggaaagaaaaacagttattgtaacagccttagaaatctttgggccaagttgtctttttgaagcaggatgtatttggatatttaaaatgaaatatatccagagtaagttccccaggtaggagaaacctaacatctatttaagcatttgtgcccattagaataacccttggactattctgtgcttcctggaaacctggatggggctccatggatgtgattcttcccattgctagggaaggatgatcacaccatggagacagagccaatgagagccctgggcaggggcatgtttatcagcattcaaaccctgctcccaccctggcagccctatcccacatccccaccttattgctcaccagtttttactactaacttgtattatccccagagcctacaggagggcctgccacagagtaggtgctcaaaaaataagaaaaaacatttcatttgtactaggaagagctgcacactggtaaaaaacaatctcatttgctcagcattttctcattcattaccttttgagagaatcagaaccgtgtgaatatattaatccctaaaaggagtgtggttgatggtagcaaggaatacccttagtaggagggggattgtgtatgcaactccttatgagatggctaaataagggaattcgaaaaattgcaaattttgcccatgactttgtgggtatcactcatcattcagctctaaaatgagatttggacactttacttaaccagaaacaaaatgaaatatataatctatgtctttaggctgtcatttgagaagtaaggttttcaaatcattttcaagacctgaggacgtggcacactccatgtgtgcctggactcttttcagtgctgcttcctaaaggaaggtggaagaactaaaaaggggcccatgcccctctgtttactagggaaggaaattgctgtgcacttttgcctggggtttggtctaggattcttttgatgttgacttctagagcatttttgagactttttgaaataaatggctctaatgcctatagtagcagggaatgaagaatgcttaagatcagctagccttaaacgaacagacacttgttctgtgtctcccagccctgtctagggctgccgtgcagctgtaaacgagacagaccgagagcccctttgtcataacatacaggacctgtattttctttgccttctttggaatatattttatttagtggattatagtttgttccattaattggactaataattttgaccaggtgactatttctgaaacatgctgattttgccactgtaaatcaatctgctgcacatcaccttttaaaatctaacaatgcttcttttagtatttttggaaatcaccagagagagcctcattatctctgaaagcaaatgtcttgagcttctttgagaaatgcaaagtgaaattatttgcttttgcttattgattatctcatcaattcttagaagtgcttttgatttctgaaactattgaattgtctataactttttattttcccttatactccttccaaataaaaaagtgtagcctggttcttattaagataaacgtcattaaaatttatgtgaagacatctctctaaatacagagtactaacatttttaaaaattgaaaccaagaacttgtgctcatgagaacacattcagacaaaatccaggcatgaaaagtgttaggataaagtttcagatttcaaggccttaactaaataactgccacagaggctttttatacagacaaacacgtgatcacatgcaccagtgccccattgagggacctgtgtcagttacacacctcagtccttgaaccttgaccatttcactctaggccctgggttctctaatgaatagtttcaacaggcacttcatgcctgtctgtatcctggaatgtagaaatgttcagggctgctttgtcagctgctttgcagctgttctttccctggaaagggaattgcagatatgagctataccctgccagcctttgtgatataaaagcattctatcattctgtaatggcttgctcttcagagaaacagaatgagtggtctttttgtggaagaggcagtaagtcacactttcacagcagtttggcatgattaatataaagtatatggaatttgtttatttagcaaagatgtattgattatatttcaaagttgggtaaagtttttaatatacataaagttgacaaagtagcatgatttgtatctgatctttcacatttaacagttgcttggaaaagatgctaattaatgaagaggagcaactactattggtgtatttttcacagattggtgctttctaaataaaaattgaaagtaactcctaacattgaatgggtttgctactgaaaaagtaatgatcttctggtgcaaacagttgcttgtggacttaaaccttggcactggtggggaatttggtcagattttacaatctctgtcaaagagtagacagctgaactcacaccacacccagcttatagaatgtccatggaagatgaaggcgcaccagaagggaaggaccctgcgcagaatggacgtggtgaatggtgtttaaaatgccagatgccaaagagtaacacgattccctgctgaccccttaactctaatccatccagcaccatggagcagcctgcatgtgaggaatggaaggagcattcagggcctccaagtgacagtctctaaaatggggtggtgccaggcagattagcatgttcaaagctgacaccactgaggtcgtgttttttgggtgacaaagccaaaggagagaaaggccaaatattccagccctggccgaaagatgatcactcaccagacggaagcaagcgtgctgcgtggagcatccatgcgaagatgtcaattccatagatcaataggtttccagttttcttcgtgatatgttaatatagcaaacttaccatgatccggttttctcttttttctttttttttttacaaagtgctgaattgtttggaatatcaagagtattatgtaataaaaacttgttgatcataatttttcttgttggctttttggaaagcaataggcgatctgatttttcacaagctgaacttctgtctttcttgctttgcaaagcaaccctagtcatctttgtgctgcttccatggtgtctgctgtcatttttggcctttacaaattgctcagggctcatttgaaaagcaagttacctaaatgatgttttaatgatctcgaactcttgcttgaaacagccttagtaataatccagtgtacagcttgcctgcaaacatttcccagccccaccatgacaaattttaaagtggttagacattttgttttgaggaagtccaaaccacaacttttccacattcagaaatgaagctatttaatttgcttacgtgatgaagggagttgattgtgtttcacccaatccagaagaaagggtccttgtttgtattggctttttactttcagcccggctagctgttactgtccttattgtttaaaactggtagttgtattcatttacttggtgtttgctttttctgcttgctgtaaaaaaacacagtcccactgccaaacatttctttcagcttcaaacactccagagtgaaaattcgaacctcaggaaacaggccacaaccaatgtatatcaggtgcaaactggttctgagtacacagacacttccaaccactcttccttaaagagacgtccgtctgcccggggcagtaggcccatgtccatgtacgagaccggatcaggtcagaaaccatatctcccaatgggagaagcgagccgccccgaagagagcaggatgagactccagcccttccccgcgcacgtaagtaacaccactggcgcttctgctgttcactctatgcagcctgtctactctgttccctcttctgaacctacaggtccccacagctctgctttgccaaattggactaagagagttaccattgtgtttgctgtattaacatgtccacagatgcttgcgatattcccacaagcacacagggccatgggctgatggtttcctaaccaagttggggattctggctcttgcccgaactgctgcttttttctcccccacatccatgattatttctcaaccagccagtgttggaactttttttggtaaagcttccttccttctctacttccaaaaacaaaaataaatcataaagttcactctcagaaggaagtgttgccttcttggagctagacagggatgtgcccctttaagtactggagcccttagaatccaagacgtcttttcagctcctcctcaagcaggtggccttgagtctgtggcccaggtacccaggcaaggctggaaggctccaggcttccgcagcctctccatgtgtgctcagtgtgcctgctaggttcgcttctgcatcctgctcctcccaccgtggtgggggaagtgtggctttgttgtctcagaaaaggaaatgtaatactctacatcagtcttagaagcgctgaattccagagattgtgttctgcagcagggttcttacaatcttattttgcattgggatacatactgtgttataaggttttcaaatatatttcttctggattactttattataaaaatatgtgttttgccaagatgttacatttaaactttttcatgggatgctttttcagagagtagtatttgtctttttgagtgtcaaagtttattatttcttcagtcaaattttatgggagtttccaaaaaaattctcaaggtagatgcaaagcaaggacatggtttcgtgaattaaaccctagtttaattttgtcaattttcagtgtggtaaaattacaatattgttttactataattgggagtctgttatctcagattctttttaagatatttgggtttaacattctaaggcaattgatttgatacatttgatgtaatgggaatgccactgaactaagttaagaatcttttttttttgagatggagtctcgctctgtcacccaggctggagtgcagtggtgtgatctcagctcactgcaacctttacctcctgggttcaagcagttctcctgcctcagcctcctgagtagctgggactacaggcacatggtcctgtgcctggctaatttttttgttttagtagagacggggtttcatcatgttgcccaggctggtctcaaactcctgagctcaggcaatccgcccgcctcagcctcccaaagtgctaggattacaggtgtgagctaccatgcccaccctaagttaagaatcttatttttgtatagctgaagacaaaatttaggaaaagcaactttgttatttttcagtgtactttcttattttagaaaaaattagaatataaagatatatcaggaaggcactgtaattgtactaaaaattagattgatagtgtatagcaacttagaatcatttttatagtttctcatttcacatcagtcctgattgaaaaacaaatatgcatttcatagtatccattaaaaaattattgacaagtttgacaaattatgttaggtatttcccttatggaaaagcagccttattaaattcagagtaatttccaggaggtgtttcaccaagggtttaagcatctctggggtcctgtcactggtggccactgagattgcagcactcacgtcacataatgtgtggtgttccaggattcttttactgaagctggcaaggtggtaggtttttggtttgttttgtattttcccgagtgtgtttctctttcccattccagatcgggaggagtgcacttgtgacctcctcttcatctctgccttccttcccctccacactttcctggtcgagggacgaaagcgcccgaagggttaagtacattctgaatggtctgctctctggaggaggggccgtgctcctgggcgctttgtgcttgggctctggccctcctgtccctgctaactgcccttccgtcctgcatgaggcagcacttcctcctggtttctcacagtgcatcaggctcacactcgtccacatgcacgctcacccatcgagggcgcctccctttctctaaccccatactgctcatgttcacgtcatatttaacaaagtttgcaaatcaccctacagcatttattctgagcaaactgtttttttaaacaacgagaaaattagctggctgctggttagatattataataggccaaatttgttcaatttgttcagggctacagttgtcagattgaaactgctgtatgtggactcgctgaagtactaaaatgtcatgcctttttttttttttttaacctgtgacacattttatgtcagcaccacaagtgctgacaaaccaaggtttacaagtccctgcatcttgaatcagaattgtaacaccttgtggcattggagctatgcaagcagctgttaacctaaagctgttcacttgtacgggttggttaaacctcacctactggtgtataatttatggtctcaatagcagtgcatgattcaggtaagcctcttttagagtagtcaggcagtaagtattaagcacctcctccatacacagcgtttgggtaagtcaatgaaagggtcctaaggacttagctggcacagcccctgctcccaaaggcactgtcaattaaaaaatactttcatgcataaagagtggtacatgaccacaacctgggaaagccgtggaaagggcataggctttgaaatccacgtcccagttctggctccatctcttttttaatggaagggtaatgtaaggtaagaggaggaaggtggctgtgggtaagggaccacctttacaggcaaggtggggtttgcactgggcctttgccattccctccacacctaggaattatggagagcctttctttcctagttccagtggcatatggattaccaaggccctttcaggattcgtttttttattttttattttttagagacagagtctcatgttgcccagtctgtagtacaatagctatttacaggcatggtcatagcgtactgcagcctcaaactcctgggctcaagcagtcctcccacttcaggcttctgagtagctgggcctacaggcatgcgccaccatgccctgacccttttggaattcttcacttcactttcagtctattaagaattctcagccgagtgcagtgactcacacactttgggaggcctaggcgggtggattgcttgagcccaggagttcaagaccagcctcagcaacatggcgaaatcccatctctataaaaaatataaaaaattatccgggtgtgttgatgtgcacctgtagtcccaggtgcttgggaggctgagatgggaggatcacttgagcccaccatgagagatcgaggctgcagtgagccatgattgtgccattgcactccagcctggacaacacagtgaggccctgtctcaaaaaaaaaaaaggaattactgtactaaaaaaaaaaaaaaagaattcttgatacattgtacttaaagtctcggctgggtgcagtggctcatgcctgtaatcccagcactttggaaggccaaggtgggtggatcacttgagcccaggaatttgagaccagcctggccaacatggcaaaacctgtctctactaaaaatacaaaaattagcggcgggtggtggcgcatgcctgtaatcccagatacttggaaggctgaggcacgagaatcaagaatcccttgaacctgggaagtggaggttgcagtaagccgagattgcaccactgcactccagcctgggcgacagagtgagattgtcttaaaaaaaaaaagtctcctgagcagttctgaaattgaactgtaatgtttcattaaaatagcccagatacaactaaaggacagttagacagtgattaaatatctcattagaaattttgtaagtcaaacctcttttgtctactgtgaaatttttgttttttaatttgtatggtagccttaaaaatcattgcaaggactgcttgctgagacagagttttgtacaaaaatcatttaaactgatcaccctgattgttcctgacagcttcatcatgagtttagatttttatggcgtgtctttattcagagaaaactgcaaacctattaaatacattgaaccagcaccagctataaggtaaccttcctattaacagctttgagagagcagcactcttaaccaatagcttttggctctgcatgcttataatatttttgatacaattaaatgctggctacactgaaattctgtacatatgcttttgttgacaacgatggaaggacttaactaacgtgtaagtaactgatttcctgggtggttgctgctatatgttgttttccatacttgaaaaaacatttaccaaatgcatttattaggtatatgagtcactactcttctaaaatgtttaaatgaaacttggtacttttcatcattgagggtaatgcatttgatttgcgatttatcacattttcatcagggaaggcaaaaagattcattataaaggccagacatggtggctcacgcctctaatcctagcactttgggaagccgaggcaggtagattgcctgagctcggtagtttgagaccatcctgagcaacacagtgaaaccctgtctctattaaaatacaaaaaattagccaggtgtggcggtgggtgcctgtagtcccagctacttgggaggcttaggcaggagaatcacttgaacctgggaggccgaggcagaagttacagtgatccaggattgcaccactgcactccagcctgggcgacagagcaagactctgtctccagataaataaataaaaaagattcattataaaaatgtagaattttctgggtttaattctgtttctagtttgttttccactggagcagctctgggcaaatttttcagtataattacgtaaatgcaagtttttatctattcatatatgtgtatatgtatacacacacacacctctgtgtgggtgtatatataaaaaccaaaataaaacttaaaagttagttggggccaggtgtggtggctaacacctataatcccagcactttgggaggccaaagttggaggatcacttgagctcaggagttcaagaccaggctgggcaacatagtgagaccttgtctccacaaaaaagtacaaaattagccaagcgtggtggcacgggcctgtggtcccagctgctcaggaagctgaggtgggagaatcgcttgagtctgggaggtcgaggctgcagtgagccgagattgtaccactgcacttagcctaggcgacagagtgagaccctgtctcaaaaaaaaaaaagaaaaaaaattggcagggtgcggtggctcacacctataatctcagcacttttggaggctgaggcgggaaaatcacctgaggtcaggagtttgagaccagcctaaccaacatagtgaaaccccatctctactaaaaatacaaaattagctcggtatggtggtgcatgcctgtaatcccagctactcagggggccgaggcaggagaattgcttgaacctgggaggcggaggttgcagtgagcctagcttatgccattgcactccacaggcaacaagagtgaaactcaatctcaaaaaaaaaaaagaaaaaagttaggcattccctgtgaaagataagaagggttttgggtttttcttctttctttttcattttctaagctcatctctggaagaccacagtgcttgcccatgatcttcctgctataaacttctagcagccaaactcactgactgttcataaagccagatcaaaacaaggcagcaagagaagcagaactacttattgataggagatataaacaaagggatcatcaaagttgtcgattctacagaaattagctttacagactccccatatggctccaagctaacgtttaatcatttgccagatggatttgagtggcttcaggatgcacgagttcatagtgaattttaggagcccacagcaagtgtcttgtatttgagcagctgggaactaaacagcatgcgtggaggtgtggatggaagacctcagccgacagaggagagaacatgcgccctgggagcagaagagtgtatggggatagcaaacaaagtgtggtgtgaataaggggggcttctccacgtgggtccggctgccttgcctgtacccaccaggtgttatcagtaaggagtgacaggctttatgtagagttttgtggggtttttttttttttttctttttggttttgttttgttttgttttgttttgttttttgagttagggtctagctctgtcacccaggctggagtgcagtagtacgatctcatctcactgcaacctccgcctcctaggctcaagagatcatctcacctcagcctcccgagtagctgaactgcaggtgtgcactaccacacccagctaatttttgtacttttagtagcgatgacgtttcaccatgttgcctaggctggcctcaaattcctgacctcaagtgatctgcccacctctgcctcccaacatgctgggattatgggtgtgagccaccgcacctggccatgtagaccttcttaaaccaacttactcaaaagtagccactcttttggatgaagctacagggtttccatatgtttaaacaaagctcttagtttacatctgtgtccttagccacattttattgcagcatcaataaaactccttagtcccatgttttgattaacttggatgaaattcaaggagtaaagctagaaatagctcacacttatattttataaggtaagtggtttaggttttaaattagcctccactgatctctgttccagagaagttctcaagcattatgggtgaaataaatagggaaaataatgttcatgaaatactcagaacatagtccccttcgaaggaataaagtccccttcaaatttcgtcaccctagaagatcgtgtgtttagcagtgctgccatttgttcaaaacatttttaggattcctcttttgaatctgtatcccatttttgatcaccacagttgcaccaaatctttacattttaaggggtagatttgagcccaggcatgaaatattggaggtagcaggaggcaggagacctggtgcttggtcctgtttttctgcagactttgtggcctttggtgggccacccagcttttttggcccttcattttctcatatggggctcaatgagataatctgaaggtggcttccagtgctgaaggtctgtggtcatataagtgctggcatgtttttttgtttgtttgtttctgagacagggtcttatcttactctgtttcccaggctggagtacagtggtgcgaccatggctcaatgcaaccttgaactcctgggctcaagcagtcctccctcagcctcctgaggagctgggactacaggttcatgctaccatgcctggctgatttatttatttatttatttatttatttatttatttatttatttattttatttattttttaaatgttgcccaggctggtctcaaactcctagccttaagcaatcgtcctgcctcagcctcccaaaatacagggattacaggtgtgagccaccacaccctgcctgtattttaactgcatctcattatgttataaatttgagaactaaatgaggatatgttgccttgcatgtctgttagtttgtactaaggatctgattaggaagtggccactgagctaagaagaaaatggtgcaaagaaggaaagaggccatttctggatccaatattcatcttttactaaattttcactagagagttgtcccctgtcccaaatgagatttgggatgtgaaggccagtagcctaacaggtaacaattcctggggaagactcctgagaagagtctcatgttacaaactcatgagggtccctcttctttcttgtaggcatccaggctggagaagcagaacagcacacctgagagtgactacgacaacactcccaacgacatggagccagatggcatggggtacatgcacaggacgagcgtgccaggggaggggctccccagggccagagacctggcaggcctgggccagcagaagcagttcaccacacacaccccttttctctattttcagactcataaagtcttaaagtattcaagcatacgctcgtagtttacatgtcttgtcatctcacattgttgccgaaaggcctttttctttgtaccagcatgttatgtgtctctagctgtctgtagtgtgtttaaagtcattaccccacttcatcatgaagacaacattaggttacattctgcatttgtacccaaggagttggcccacctgaggatggctttataaacaaacaccctccccgctccaggtatttccctcccttttcccctccttcacccttcctgtgagagtcaacacttccagccctatggtagagtgaaatagccgattttagagccttaccatgagtctcctgctagacaggataaaggaaatgacgagaccagcctgctcatgcatttagccagtgcatacaaagtggctcctagaagcagaggggcagctgataagcacctgctgtatttaactgcatctttaatgttcacaggtcaagccgaaagggacggcaaagaagtatggtgtggccaggggatggcttggtaccagacacagcagaaccccatgtggccccaagccccactctccctagcaccgaagatgtcatcaggaagactgaacagatcaccaaaaacatacaggagctcttaagagcagcccaagaaaataaacatgacaggtaagcaggattgaagaccctgctttgggagagcatgagttatgcgcccagaaagggatgatgcccatgttcctaatggcagctattcccagcatgctgacttcaaggtcattgaaaacaagtctacataacaggcttaagaacaatgtcagttttggtttgctttgtcttgtttgatttacatggtattttcttttttttcatcttgttacgaagctccgaaaataaatgcctctagaaacaggattgcggcatagttagggtggtgacaatgctagttctaggagggggacaggggctaccttacacctcgctt

SEQ ID NO: 239 - DNA, 2287 bp, Homo sapiens
cgccgccgtcagcgccgccgcagctgggacccgttagagcggaagcgccgccgccaccgccgcctttgctgtcccccggcctctagttccccgcaggtgggaggtgggagccatgtcgaaacggctccggagcagcgaggtgtgcgctgactgcagcgggccggatccttcctgggcatcagtaaataggggaacgtttttatgtgatgagtgctgcagtgtccatcggagtctagggcgccatatctcccaagtgaggcatctgaaacacacaccgtggcctccaacactgcttcagatggttgagaccttgtataataacggtgctaactctatatgggagcattctttgctggaccctgcgtctattatgagtggaagacgtaaagctaatccacaggataaagtacatcccaataaagcggaattcatcagagccaagtatcagatgttagcgttcgtccatcgcttgccctgccgggatgacgatagtgtgactgccaaagatcttagcaagcaactccattcgagcgtgagaacagggaatcttgaaacctgtttgagactgttatctttaggagcacaagccaacttctttcatcctgaaaaaggaaacaccccactccatgttgcctccaaagcagggcagattttacaggctgaattattggcagtatatggagcagacccaggcacacaggattctagtgggaaaactcccgttgattatgcaaggcaaggagggcaccatgagctggcagagcgcctcgtggaaatacagtatgagctaacggacagactagccttctatctctgtggcaggaaaccagatcacaaaaatggacagcactttataatacctcaaatggcagacagcagcctggatttgtctgaattggcaaaagctgctaagaagaaacttcaatctctaagtaatcatttgtttgaagaacttgccatggatgtgtacgatgaagttgacaggcgagagacggatgcagtctggcttgccacgcaaaaccacagcgccctggtaaccgagacaacggtcgtcccctttcttccggtcaatcctgagtactcatcaacacgaaatcagggcagacagaagttagctcggttcaacgcccatgagtttgccacgctggtcattgacattctcagtgacgccaagaggagacagcagggcagttctctctcgggttcaaaagacaatgtggagctcatactgaaaaccatcaataaccagcacagcgttgagagtcaagacaacgatcagcccgactatgacagcgtggcatcagacgaagacacagatttggaaaccactgcaagcaaaacaaaccggcagaagagcctagattcagatttatcagatggaccagtcactgtacaggaatttatggaggtcaaaaacgctctagtggcttctgaggccaagatacagcagctaatgaaggtgaataacaacttgagtgacgagctgagaattatgcagaaaaagttgcttggaaaagatgctaattaatgaagaggagcaactactattggtgtatttttcacagattggtgctttctaaataaaaattgaaagtaactcctaacattgaatgggtttgctactgaaaaagtaatgatcttctggtgcaaacagttgcttgtggacttaaaccttggcactggtggggaatttggtcagattttacaatctctgtcaaagagtagacagctgaactcacaccacacccagcttatagaatgtccatggaagatgaaggcgcaccagaagggaaggaccctgcgcagaatggacgtggtgaatggtgtttaaaatgccagatgccaaagagtaacacgattccctgctgaccccttaactctaatccatccagcaccatggagcagcctgcatgtgaggaatggaaggagcattcagggcctccaagtgacagtctctaaaatggggtggtgccaggcagattagcatgttcaaagctgacaccactgaggtcgtgttttttgggtgacaaagccaaaggagagaaaggccaaatattccagccctggccgaaagatgatcactcaccagacggaagcaagcgtgctgcgtggagcatccatgcgaagatgtcaattccatagatcaataggtttccagttttcttcgtgatatgttaatatagcaaacttaccatgatccggttttctcttttttctctttttttttacaaagtgctgaattgtttggaatatcaagagtattatgtaataaaaacttgttgatcat

SEQ ID NO: 240 - DNA, 1419 bp, Homo sapiens
atgtcgaaacggctccggagcagcgaggtgtgcgctgactgcagcgggccggatccttcctgggcatcagtaaataggggaacgtttttatgtgatgagtgctgcagtgtccatcggagtctagggcgccatatctcccaagtgaggcatctgaaacacacaccgtggcctccaacactgcttcagatggttgagaccttgtataataacggtgctaactctatatgggagcattctttgctggaccctgcgtctattatgagtggaagacgtaaagctaatccacaggataaagtacatcccaataaagcggaattcatcagagccaagtatcagatgttagcgttcgtccatcgcttgccctgccgggatgacgatagtgtgactgccaaagatcttagcaagcaactccattcgagcgtgagaacagggaatcttgaaacctgtttgagactgttatctttaggagcacaagccaacttctttcatcctgaaaaaggaaacaccccactccatgttgcctccaaagcagggcagattttacaggctgaattattggcagtatatggagcagacccaggcacacaggattctagtgggaaaactcccgttgattatgcaaggcaaggagggcaccatgagctggcagagcgcctcgtggaaatacagtatgagctaacggacagactagccttctatctctgtggcaggaaaccagatcacaaaaatggacagcactttataatacctcaaatggcagacagcagcctggatttgtctgaattggcaaaagctgctaagaagaaacttcaatctctaagtaatcatttgtttgaagaacttgccatggatgtgtacgatgaagttgacaggcgagagacggatgcagtctggcttgccacgcaaaaccacagcgccctggtaaccgagacaacggtcgtcccctttcttccggtcaatcctgagtactcatcaacacgaaatcagggcagacagaagttagctcggttcaacgcccatgagtttgccacgctggtcattgacattctcagtgacgccaagaggagacagcagggcagttctctctcgggttcaaaagacaatgtggagctcatactgaaaaccatcaataaccagcacagcgttgagagtcaagacaacgatcagcccgactatgacagcgtggcatcagacgaagacacagatttggaaaccactgcaagcaaaacaaaccggcagaagagcctagattcagatttatcagatggaccagtcactgtacaggaatttatggaggtcaaaaacgctctagtggcttctgaggccaagatacagcagctaatgaaggtgaataacaacttgagtgacgagctgagaattatgcagaaaaagttgcttggaaaagatgctaattaatga

SEQ ID NO: 241 - DNA, 55998 bp, Mus musculus
  misc_feature (653)..(1291): "n" at positions 653 through 1291 can be any base.
  misc_feature (12656)..(13095): "n" at positions 12656 through 13095 can be any base.
  misc_feature (20153)..(21482): "n" at positions 20153 through 21482 can be any base.
  misc_feature (25312)..(25675): "n" at positions 25312 through 25675 can be any base.
  misc_feature (33216)..(33235): "n" at positions 33216 through 33235 can be any base.
  misc_feature (36721)..(37194): "n" at positions 36721 through 37194 can be any base.
  misc_feature (42797)..(42816): "n" at positions 42797 through 42816 can be any base.
gttaataaaaggtgaattcgtgttacaagatggttcacacctatagtcccaacacaagagagcctgaggcagcagtagtcaaggccagcctgggagctacagtgagactggctcaaaacacaaagtaaaataagtaaaagcaaagagggatccttatccatgactcctcagatgggagcacttgctgtttttatggaggactgggggccagctcctggagatcagcaaattcagctccgtggggaccaataccttttggtttccagggacacttgtgcacacgcaggcaccacatgcctgtgtgtgcacacgcacacacaaaatacatctaaaataaacacatactgaaaggcagtctttcacagctgtaatctcagcatttgagatgctgaagcaggaggagagtgaagttaagggccagcctgagagctacagactgaactctgtgtaaaattaaataaagaaattgtggggtggtgaaacctttaatcctagcactcgggaggcagagacaggcagatctctgggtttgaggccagcctggtctagagagtgagttcctggacagccagaaaccctatctcaaaaaacaaaataaaaatagatggaaggaaggaaggaaggaaggaagggagggagggagggagggaggnnnnnnnnnnnnnnnnnnnnnnnnnnnnnnnnnnnnnnnnnnnnnnnnnnnnnnnnnnnnnnnnnnnnnnnnnnnnnnnnnnnnnnnnnnnnnnnnnnnnnnnnnnnnnnnnnnnnnnnnnnnnnnnnnnnnnnnnnnnnnnnnnnnnnnnnnnnnnnnnnnnnnnnnnnnnnnnnnnnnnnnnnnnnnnnnnnnnnnnnnnnnnnnnnnnnnnnnnnnnnnnnnnnnnnnnnnnnnnnnnnnnnnnnnnnnnnnnnnnnnnnnnnnnnnnnnnnnnnnnnnnnnnnnnnnnnnnnnnnnnnnnnnnnnnnnnnnnnnnnnnnnnnnnnnnnnnnnnnnnnnnnnnnnnnnnnnnnnnnnnnnnnnnnnnnnnnnnnnnnnnnnnnnnnnnnnnnnnnnnnnnnnnnnnnnnnnnnnnnnnnnnnnnnnnnnnnnnnnnnnnnnnnnnnnnnnnnnnnnnnnnnnnnnnnnnnnnnnnnnnnnnnnnnnnnnnnnnnnnnnnnnnnnnnnnnnnnnnnnnnnnnnnnnnnnnnnnnnnnnnnnnnnnnnnnnnnnnnnnnnnnnnnnnnnnnnnnnnnnnnnnnnnnnnnnnnnnnnnnnnnnnnnnnnnnnnnnnnnnnnnnnnnnnnnnnnnnnnnncctgatgctatataactagaactggtgagtaaagatattttttccatccagatgttaaccaggcttgaccctgcttagctttcaagtacaggggatatggccatatatgatcgaagttacttctacagtggtttttacgtgtgtgtgtgtgtgtgtgtggtggtggggggggggtggagctgggttttgggtttttttgagataggttttctctgtgtaaccctggctgtcctggaactctctctgtagaccaggctggccacacgtgtgccactactgcccggctgagtgtgtgtgtgtgtgtgtgtgtgtgtgtgtttaagacagagtctccttaggtggtaaccacctgccacagtctgggatgacaggtaagtgccatcttgctagggtattaggtactcactctgctctgttcaaatgttgggtatcttgatattttatatgggtgttgaagatttgaactctggtcctgactgcccagcaagccaaaccatcccctatctctttgcctgtcatttcttgagcttccttataactctttattcagagttcattgggatgtattgtatgttttatggtaccttaaatctcaagttcaaagatatattgtaagtatagcattattccaattcatcgttgatctacaaaatcagaagtggatacgtcactaggatggaaaatgtcaaagcctgttagtgaattagtgagaacaagctacagtaatgaatcaaatacaatacgacatgccactatagtttctgtcttagaacacaggcctgtaatcatagctctgtgggaggctgaggagggaagatcacaggttccaaggcttgcttgggctgcagaatgagttcaaagatagcctgggctacttagagagactgtttaaaactgactagtacaagaacaagtacttttgggggtagctcagtaagacaacacttgcctagcatatatgaagccctgggctcaatcccaatacacaaagaaaaaaccccacaacaaacaactttgtgtctgtatcatagtttctcccttcaccctcagttttgtcttaaatttatttgtttgtttgtttgtttagtatgtgggtgcacatggctcacgggtggaggtcatacgacaattcttagttctcccaccacatggctcccagaatcacctagcttaacagcaagcacatttacccagcaagttaactggctgactccccagtttctctcttgatagacagatgagtaagttgctggaatggctctaggggacacaggctgctgtgataggttctacgtcataatacatggttgccccggccgttctgtggcatccttctcccatgcactggtgatctcaggccctgaaatggcaggctcactgccgtgtagactctcctggttagaactcaattccgtgatcccataagctgcaagggtagctgagaagcatggtcaagcttccactattcacgaagaagagaaaatggatgattttgggtgagtaattagcactctgtcatgatttgtattcaatcatccgagaagagcggattcctaacacacggagttcttggttgtagagaacattttgtataatcagtaagcaggatcgttagtgtcacttctctggaaagaagttattggcaccgacaaagaacattgttcatgcaatagttatgccactgtggtgtcttgaaagaaatgtctcccataggctcaggtgtttgaacacatggtctccagctagtggcgctgttagccttagagcatggagcttccctgaggaagtttgtcactgaggcaggctttgtgaatgggtaacttcagattacttctgtttctggctgtctgcttcctgtgggcagctgggatgtgatttccttagcctccagctttggcccacctgcaatcaggcctcccctgctgtaatgaactctgcctctggaatagtaagctgaaataaactttatctacaagtcggtttggtcatggtgttttatcacagcaaccaaaacgaactaatacaaccacactttaacaaatacaaaaatattgaattcctacaacacctttttaaccttaaaaaaaaaatcaaatttattaaggttctgtgtgtgtgtgtgtgtgtgtgtgtgtgtgtgcgcgcgcgcgcgtgttttctagctgaaacacaatataactgatctgaaatggtgtatgaaggggtatatttcagccttggtattgatttatttttcaattgtgggggtcaggcaagtactctatcactgatctatatccctagattccttgaactcaccctgaagccccagcaaactttgaattttttatcctcttttctcagcctcccaagaagctgagggtattgacctggagcacccatctatccatttctacaagcgcgagcttggttacctttttgcccacaggaataccagttttaatgatgtgtctgtgggttttgcattcattttgccattaacatttttctggttttcccacagtgttctttaaggtgtctacatcgtgccaggagcccagggaccacttgcctacttctggacatcttcactgtaatgttcctagccttcagcttcgatctgcacctaagtctgaaccctgcttcaggtcaatgctaaacatgtaatgaagtccctttcccagtaagtacagcaaacagagaaacagggatacttgagttatatgtatcctaaccttccacgcaggctggggaggtggaggcaggatgatctgaacttcaaggtcatgtcagctactcaatgagtgaacaaggccagcctgttctgcgtgaccctctcgacctttacgctggagacagggcattccttttttgtttggtttcctttagccattatgaaagtgcctgggcagcagatccccgtgctgggcccgcatctcgtcccacacgtttcccagtcatgcatgctcttctgctacagctaacagcagtgctgcgccacactgatctagacacaaagttccatcctgccgagtgaaatgtatttgtcacccctgctaaattttccttaaataagtccaagtgcaagtgacaggatcgtgaaacacaagaggcgtgtaagtggcgttcggatcgatcagccagtctagcagagaataggtgtccttctgctgggtgggagccctcaaagtcctaacagggtcatcgggtcatatgcaaatgatttcagcacttttctattggggctggtgagactgctcagtgggcagaattgccaccaggtttaatgacctgagttccatccccaggagccacatggtagagggagagagctcactcttttgggctgccctctgatatccacacaaaagtatacattttaaaagactaaaccccccccaaaaacctttatattcaagttacaatcatctagagtgtccagagaaggcttaaggccttgcaatattcctcggggatggcccaacatttcaaatgaaaatatagtacaaatttattaatttatctgagtgcattcagcagacttctaactccaggagactagtgcagggtacaactttgaatatttgtcagttcgaatgagagttgctattagagagcggaggttccaatgaggcagacatgcctcggaagctaatgaagaacaaataaaaatgtgctagaaggctcttggaatagtttatttgcatccccatattaatatattccattttaatattgagacaaggtccggaactcactatgtataccaggccagcctcaaactcagaaatctgcctcttcagtgttggaattaaaggtgtgcaccacacctgtctcttaatgcattttaacaattttcctatagaggtgagcttcaactccatattgattaaaaaataaattaaatactcaaaattagttgatattactctattctttttggtttctcctgacagggtttctctgtgtagccctggctggcctgggactcattttgtagaccaggctggcctcaaacactgagtttctcatgtctcccaagtgagattaaaggccaatttttctatattctttagttaattgcctttagttaattattgttaattgacttcatattccattgtcttttttcatatttattttacacatatgaatgggtactctgtgtctaggaattagatggttgtgggccacctgtgagtgctagggatggaacccagtcctttataagagcaataaatgctcttaaccacttggccatctctccactccctgcattgtcttcttgctattgttttgttgaatgtttcatgtagcccaggctagccacaaactcactaggcagcaaaggatggccctgaacttctgaccctcttgcttgtatcttttgagtactgggtttgtaggtatgcatcactttgtccactttctttctaagatttattcatataggtgttttgtctgcatatatgtatgtgcaccacatgtgcctggtaccctcagaaatgaggacagggtatcagatcccctgtaactggagttacagatggctgtgagctgccatataggagctggccacttaattcaggttctatgcaagaacagcagttgctctaagctgttgagccatgtctcctatcttactttttttttatagtcatattttatttttaaaaatttcagagctgagcagtggtggcgcatgcctttaatcccagcacttgggaggcagaggcacacatggtggctcacaaccatccataatgagatccgacaccctcttctggagtatctgaagacagctacagtgtgcttacatataatagagaaataaatattttttaaaaattcatttgtatgggtgttttacatggatgtttgtataccatgtgtgttcctgatgcccttggaggctagaaggcaccagatcccctggaactggagttctagacagttgtaactgccacgtgggtgctgggaactgaacccaaatcctgtggaagagaagccagagttctccattgctgagccatttctccagcccaacttaacttttaatatagagatcttgggtaggtcagtctactcctacttccatgctggaccaacaggaataggctatcatgcctgacttactgttttgcccaatagcccaggctgcctcaaactcattgctattataggtaggagtcaccatggtatatattttttaagtgacctgtagtaactatttttggttagtactttttctccatgaccaactcagtaacaaagtaactattcaatcattaaagcattttaaaaaaaagtcacccaggctagccagatggctcagtgggtaaaggtgccaagtttgatgacctgatttcaatctctgggctccacaaggtagaagagctgactcctgaaagttgttctttggtcttcagacatgtgaagtagcacatgtccccagcaacacacaaaaatgtaatatacacttaaaaaataatctaatgcttcattaagcaatagaaaactatgagtgactttttagaatttggacttcaacattcctttgctattcaaatcaaaatgcagacatcctcacattgttaccatggggtttcaaaagaataatctacatttctaaaagctatttatatgtaaggacagaagagcacacaggcaagctggagcctttccaggtcattgtctctgggatccaggcagccaagctccagggtaagcggaaaagggttatggctaggttccagtctagatgcttcaagttaaagaagttcaactgtgcacacgttagcttgactaataaaaaccaaagggcctgcatcttcagagactgaacaaaggacccctcgagttaaaacagcagcaacgatgtgggtatttctaaagcaggacttctcaccatgttggagatggttgagatggctcagcagttaagagcacttgctgcactcacagaggacatgagtacctgtcccagcacctatgtgtccattcacaagttcctggaactccagctctagaagaacgtgttccgggctagcttccttgggcagctacacttatgtgagcaggcgcgtgcacacactcgacacataaataaaaacaaaaccttcaagacacatagaggctaaggacacccactgctcttatctttgagaacaggctgctcattagtttgggatggttcttggtagcccttgaaggtgcccttcttacttgaagcccactcctttctggggaggctcaaaacttgatttgcatctcattaattcccagcaggaatcaaacactgctactgactgcctagtccttcccccctcccttgttttttttcaggcagggtttctcggtgtagccatgggggtcctggtcctggaactcactctgtagagcaagctggcctcaaactcagaaatccacctgcccaccactgcccagcatcagactgcctattcctcgaagcctgttgtagtttcagtctgtaatgaggaaccgcacctgttccaggtccatataaaaattctcccaagagaggttgggtttttcttactactttcctgaaatacagatcaactgggagcagtacctaccactaaaacacacaataaaaatgtaatttaataaccctgtaaataataattacacacattcatatatatatatatgtgtatatatatatacatatatatatatatggttcagcttctatactgactgacaccgagtaaaagccatctttcagttttgtgacactaaatgcaaaagctgttcttcaaaatttgtaaaaggaagatgctccaaaatgaagtgatgtctaacactttcagttttctattctaattagtctctaacactttggtttctcttcatatgaaacttccacctcttcacaattctgttttcttctgtccctgtcacttgagctcttggcttcttagcagaggaggtagaatggacacctccttgctccgatgtgttttgagagttattccttggaaaggactctctcacaacactgctgatagcaggtcctcaacttcagtgtttaagaagcaagcaagcatttaccatccaaaagaacaagaacttcaagacttctgctataatagattttgtacactacaccttcttaaaatatttgtaataaaaagctattattgctttaaaaaccttatccagaaacatgagctgatacattggcaaagagataatttggagttctttgtgtttttaaaaggaaacaatacaattgaaacattccagatatacagcctttgtaaaaattaacaaaaatctaaggataagaaatgtcaaatgaacaacgtaaagaaattacatatttacccagatgaaatggttttattttgtacttacagctacttagaataaacatttatcagctttcaaatccatttgtttgatataaaagaactaactaaataaaatacttagttctaatgtctcaaaaaaagaattactttgggggtgtttgcagaagcgtgtagatgaagacacataggaaaagacactatgataaagttgtgtgaataaaattaaacatgtatcccgtaatttgttcacagccggacatccacatagtaccatgaggtccgagggctgcccataagaagctggtaacccaatgggaaccagggctgtaaaggtttcttaaaaaacgtaacgtggtcgaacaaaaacaaaacccaaagcaactgtaagacctggcgtaagtgccccagttagcgactctttggcaatgcagatccaaccagacgattagaatgaaacgtgcaacgctctctctcaaaaaatcctataaagcccgtcaattatgttcggctctgagaatcggcagttcccagcaccttccttttccactttttaatattttatacagttctccatctgcggcctttccattcattaattgccctatacaagatccccccgatgactctcggggaattgcttcttttaagacagggcatcagattgccaagcctctggggtcgagatcgcgccctcgctcctttggatgtgggagcgtcatgcacttaagacttgattatttaattgcggagatgggagcagaccggtcggaggggttgtgccaagtgggcaccccggggtgtgtgtgtgtgtggtgggatttgtccttcgtgcgctccaaaaatgcgcgccctccttgggcctgccttgtgcccgcgcgccccaggcctcgtccgcccgcccagcacccagaggatgcccccgcaaggaccccgcccctcccgtgtccacgcacctgcggccccgcccccggccacgaaccttcaggtccacgcacctgccctgccttccctcccgcccccagcgcgcaaccaccaaggtgcagccgcgctcctcttcggcggccccggtatctaaaggggtccgtctccggcaccacagccaaatggctgagcctccctggcccgctgcgcaggatgcccattggaccctgccccccgccgccaccaccactattggctggcgtccgaagcctcgccatttgattggctcttgatgccgccgctccacgcaaggagccgcaggtcccgcctctacggcgatcaggttagtgtgcgccgcgggtgctgggggctcgagaaccgagcggagctggttgagccttcaaagtcctaaaacgcgcggccgtgggttcggggtttattgattgaattccgctggcgcaggatcctctgcagaaagagagagcgcgagagatggagatggacaaacggatttatttagagctgcggaacaggacgccctctgatgtgagcatttgccaaaaatatctctgtcggtccattctcctactttgtgttatgtgtgcgtgtgtgttttggggggaaggcacttttttatggaggggggctccggggaaggtgtggggtttggggtctgactgcaaatgaattgcaaggttggatggcgggggtgggggggttgcaatgccaccggagcatgtttcgtccgccgtcgctgctgcccttggtgtgtgactgactacctgtgcgtgtgctcccgcgtgtgcgggtatgggtgcgagggtgtgcgtgcgagtgtgcacccagcggggggccggcggggcgcacgcgttcgggtcggagggaaggcggcaatctcaccctcgtccgagctctcagctcccacgacttgcatctggatggaaaagatgatcgaggggaggagaagatgggctgcctcctggattaaacaacaaaaaggggttgttatattttagaagcgtaaccccctttccgccccctcccgcgcctgccccctccctttgcagtctctttcgctcgctcgcacacaataagttttgggcttcgcgagtccggtatagtttctgatcaatgtagcccgaggaccccggggagagcgcgtggggacccgactgctgcggagttgggagatggctcgagtttaaagcgcgtcttcgtttctctgcggggatgaggcgagaggtggggagccatatttgtaactttgtcgtgttcgtgaacgcgccctttctctccctccctccctttctctgtctgccttccttctcctttctctctcactctttccaccccacctttgggccagatgctgtcttttctcccttcttcctcgcggaaagggagggggggtaccttaggttaagggggagggattgtgaagtgtgcaaatgctcagataatcctcgcgcctccccaaccacgagcgtcgctaatgtaagttgcccggaggctgcgtcccgttctggcccccggctccctccccagatgccagccttggcaccctgacgcctcatcggcagcagacaccccaccttcccggtccttgcttctcctggggtgggctccctggcagccattcggcgcttggttaataaatgggcacgagaaactttatcagaacccgagctgcccagagctagtgccgctgtggggaccgacccagtctacattcttgcgggcacggcaggcacgcagctctgggatgggcagttcgtctggccgtagccgttatggattgggcagcggcgggagtatggcaggaggaaacttacaccggtgggaacagggaggctgggcgcgagcccactgcaaggggaagtgagggttggtgggtgactcgaaagctactgtttatttttgtctccctctcgctttcacgcactcgtgttgtctgcgagttgacccattcgagagaccttagggtctgcggtggaaaccctagccaacttcccctctaggctcggtagtagggagcaggagctcgcgggcgggaaagatctcgggtctagcctgagggtctggggctcgggcgagttgggggctcgcgtagcacgttgtgctgacctgtcgcccctccagccacttggcccctcgaatcctgacaaaggcaggcctcatttcctcttttctcctaattcctccttctaaacctgagtaagacttttgaaaacaagctcctttctgccgaccgcccatcctcacgcagctgtgcactggagacgtgctacagccttatggcgcgcagggcggaaggagggggcacccctagcaccaggacttgccgcgggggctgcctggttcgcccggtggcgtcccgacccagccagggtgcccgatcccggggggtggaagggactgggtgtggtgctggggggagggggccgaacgcgacttcccgcgtactttccgggaagacccctatatgtagttggggggcttcagggtcccggcgagtaggtgcgcagcagcgccggacccgaccgagcggttcacagtactagctgacccggagcgaaacggaaagcgggtcgaaccggctctttaaacttccccgagtgtgtgcgctgggggaggggcgggcgctctgggctgggcgcgatttctcacgcttcgccccctcgccgtgagtctgctgcccactcgccggcctccgggcttatggcggggtggggcgcgcgggtggcgggggagggggcacttgctgcgcatgggggaggggagggcagaaagctctcgaaagagggacaaaaggggtgggggaggaggaactggctttttgttgttgttttgctgggtttttgcttttttcaaataaacgtttttggaaaacagatcgttccggggaacctccctccccagagtcccccccacgcacccaccttctgcaacctctctcccaagtcgcatctcggggactggtggccgcgaagccgccgtactaggacgagcagccatgtttcccggggcgccggaggcccacccctcccccacggcggccgcggaccgggctccgcggggaccgtggcgcccagcggtggggggcctgagagcacacaggcacagtnnnnnnnnnnnnnnnnnnnnnnnnnnnnnnnnnnnnnnnnnnnnnnnnnnnnnnnnnnnnnnnnnnnnnnnnnnnnnnnnnnnnnnnnnnnnnnnnnnnnnnnnnnnnnnnnnnnnnnnnnnnnnnnnnnnnnnnnnnnnnnnnnnnnnnnnnnnnnnnnnnnnnnnnnnnnnnnnnnnnnnnnnnnnnnnnnnnnnnnnnnnnnnnnnnnnnnnnnnnnnnnnnnnnnnnnnnnnnnnnnnnnnnnnnnnnnnnnnnnnnnnnnnnnnnnnnnnnnnnnnnnnnnnnnnnnnnnnnnnnnnnnnnnnnnnnnnnnnnnnnnnnnnnnnnnnnnnnnnnnnnnnnnnnnnnnnnnnnnnnnnnnnnnnnnnnnnnnnnnnnnnnnnnnnnnnnnnnnnnnnnnnnnnnnnnnnnnnnnnnnnnnnnnnnnnnnnnnnnnngcgaaacgatcgcgctggtgtttgcgccttcagcggaaatgattgggtggtgtatgggggtgggggtgaaactagagggcgggaggggctcagggctctttaatctggtggccctctgtaatgccgagggcgtcagccttctacccgggagggacgagttgttggatgcgctggggaaacgccctccggggctgggctctctagaaaggttggtcgagtttcaggtgggtgtcgcagcactctgcaggctgagggagctctctcgctctttatccagttcctcaccccgcgcctcccaccccgccccccatttttgttttggcggggaaggtaggtaactacatagtaaacgctaccttaaaccgaaagagaaataggatttttctttaaaaaaaaaaaaagtaaactgtccttttgtattgccttcagactcgggcagtttgttcctaatgcaggccccgatgtgggactcaaaagcgtgtgctaggcacatcgcaggctgtaggctggtgtctgcatgtagagactaacttccatggaagtgtcgggcaaaggctgctatcggagccgggagtctactttgacctctggaatgcgttgcattttttttttctgtccaggttgacttactgcctaattgggttcgggagagtggcctggcggtttgctccaatttatgcaagccaagcggggattgggggcagagaactgaatgtggccttggtatggggtgatcagttgactcttgtgactggcagctgctgaggcttgtttttgatctgaaggttccatggtgaggctggcttctgaagccacacagaccctggcttgagttcaccagctacaaggaggtaggatcctgccaacctgtggtctgggacagattaccttagtctacatccaacgttttgtacatgtgtcctgtaagactggacagttctgtttttatcaatcaataagtcactattggcttgagttggcccttcgcaggtgcttgatatagtcgcagatactggggagtggggaggaataatttagggccccttggaggtttaaaataacaactccagcaataatagcagatgctcacataactccttactgtgtctggcatgttgctaagtggattacagacatcagttaatttagcctcacaagggcactatgttaagtactgttgttattcttatactaaatgcaaggaaatggagtcagaactccagatcaccgccagtcggtgcagaactgggattctaactccgttagactcagcctctgtactgccctgaagcaccacgggaaggactttttctcctccagttttggagtgaggccacctattagcaagagggtgggtatgggtttgttggtgttgagggcacagaaacaaagcatagcttcctggtggagcgataggtgaaacagacaagtggagtgggtaggcattttaagggggagcctgaccctggtttggaatattcagtatacactgttagatgtttccggtaatgagaagacaagcaggagccattcttagtggttatttaggtgtcttatataagtagttttttcattagcctttctgtagaaagaaaaaacaatctcaggatagaatagacaggaccttagtgttgggatgtagccatgctagtaatactgcctagagccactcacctaaccctgcctgaagttccttaaagatagccaacctctctgttctgtggatggatcacttaggactcagagtcagcctcccaaggtagtctgtggacaggagagaatgcaggttctgtagttgaccaaggcccatacatgacctatattaccagatcatccagggaaccggtaaaatgcaaatgtctgggctccaccccctgggtgtgggcttagtaccaggtcaccgtggttcgctctttatgctgctgagttgaaaacagtttgtatgtctaaccactaagagatttgggaatctgggagcgaacctttgaatgatcctcctccctacaaatctcgctcgtcgagttaacaaagttgtattaacgagaaaaaagattgtacttattttgaacttgatcaataaaagaattaagagggagatgtgtatccttttgttataaaagcacctgtgttatgttctcaattttgcttcttgaagtttactacctggaaagttagttctctttgtttagcaggcaggggaggtccctggggtcctgtgctttgttcttttaggaatgtggcaagtcctacatttgatggtgcactgtgaattttccaagaccttctgaatatgcgattaaacaacttttgatcctcatagaaatgggctcccgttcacaggccttcatgagaagttgttctcattcctggctccctatggagcagtcctctctgtctcagaggtagagaggaggaaatttaagtccagggctactgaagtttgcaaagctgcttgctgtatacctagtgactagtgagggtcaggacatatcaccacagtccccaggtcaccctggcacctccgtcccaggcctgctgctggggggggggggggggggggagacagcacacagcaaagcagaaatggctttgggttcaaaacctttgtctaattgcctcttaatgcttgggccactaagcagaagtgtgtggaacgtgaagttcccggcagcagtgtcagaccctgtcccctccctgggctggggccacattagtggcctctcaaggtgacttacttgggactggtgcagttaggcatcttctgtgcagcactgtgggtgacctgactcagtactaactcaccactctgaagagccaggcaggagctgtctgccagctgtctgctctcctctcctctctcccttctatgtcggagcccagggcttgttgctgagtggctgtggtgggggtctgatggaatgaacttggcctagcattctggcctgaattctgacctgagagaagcagctcattgctacggtgtctaaaagggtgttttccttggagcatccccttttaggctgtgtctcctgggacctactctccatcggtgctcagcacctgcttcccatagacaggtaagaagaaaaacatgaaccagacttgagtcttttttttttaaacatattgatttttaaaaattttttagatatatttatttttattttatgtatatgagtacactgtcactgtcttcagacacaccagaagagggcatcagacccccattacagatggttgtgagccaccatgtggttgctgggaattgaactcaggacctctggaagagcagtccgtgctcttaacctctgagccatctctccagcccctgacttgagtcttatattacattggcatataattatacaacaaatactgagttaaagagagggctcctgactggactggaggtagttattcagaacatttcagtgatagaattggttgaagccatgtgagcaaaacacccatggcctcaacacgtccaattccagacctggaaactgcctcctagtatagaaccacgtgtcccggtgacaccggtatctttcttcacgccctgtcctctgcggtgctccacagcaccttccgggaggtcccttcaaactgatcttgtttttactctgttctgtgcaactcccctcacccctgacacgcccagtctaccattttctttaccaaactggctccaggcagcaggtctaaaagatgagcctacttgatcacttactccagcgtggattgcagtccctgcctttctcccagaggtatttgcattttgagagtctggtttagtgaggaaattattgagaagaaccattaaagacttggacgcacttctcagcttggtcattaacttgagttggacaagttgttcagcttctctccttgtcgtctaaaatggagtgggaggggggtcgggctggggttgtagtgactgttgtagtaattgtagtaacacaattactagagttcttatctagaacatacagagccctaggttctgttttctgtactttgtaaggcagatgtaatgccagcacttactgcaatcccagcacctcgggggtggaggagggagaagttgaaggtcattctctgctccatatcaagttcaaggttagcctgtgctacatgtgaccctgtccaaataaataacctgagggtgctgaattcaagcccagtgctgttcagattttttgaacccactagtaacaggattcacaccgttgctcagcacatgcatattatttttttaaacgtgaacacttttgattcactgaaaaatatgatagctcagactcataagttgatttcactctattaccgtttggaaaatattaaaggttggagattaagcttccttccacagttttgccttttggtgtggggctggagcttgccctcccgagccttgtgtagtgtgtgcagcaacacaacagggcttttcccaatttcccaatttcatggcagctcactgctgggtcctctggtctccagctgctctctggtctaccccagacaacctcatggtaaaagtagccattagcttaagtgtgtattctccatggtgcctgcagttattggctacaccagttctccttgctacctcgtcccctagcccctcctgctgtgcactatgaagagcagccacactttcttttactgagtcagagcgttttttagagagcggtgcctggtacgtgcctgtctctcactcccagtcctggcgagttgcctcacagtgtggactggggtctccaaagtgaggctgtcaccaccaacagtctcaggcaccagatgcgtcactgccgatgtgctagagtgtgtgagctggcaggcgcttaaaaagagaaagtgaggctcgtgaggtggctcagtggtaaaaacacttgccacgcggccttgacctgagttcagatcctcaaaacccacataaaagctggaggtgtggagatgcgacatgggcagctggaatccggggctccagacaagagactaggcaaactacccggaaggttgctgcgggcaacagaaaatcaacagggcctgtctcaaaaaaggaggaattgaaggaccagcacctgttgttgcacgtgtgtgtatacacacacacacgtacatacatacatacacatacacacacaaaggctgacattaaagtggtacttgtttctgtaggaaaggaggtttgaatctggagatggcatccagatgccactgtctgttcgggatcagctgcagcagtgcagagcagcccagcccttggctctgcactgccttcccaccagggtttctgtagaggtcgatgcctatccactctatccactgccctctctctggaagctcctttttcactgcacatctgctgcttcaggcattctctcagatcgcctcctggtccttcaccctctcccagcctgcagcagcttccgtaagaaatgcctatctcctggtttcctaggaagtcctttccctgcagtgtgtgtgtgtgtgtgtgtgtgtgtgtgtgtgtgtgtgtgtgtgtttgcctgtgcatttgcatgggtgccatgctcctagaggtcaaaggcagtttgggggagttagttctctcctttcaccatgtgagtttggggaatcaaacagagttggtagcaggcagagttcatttacctgttgaggcatctctccccaactccactgccccactggttctctttctatatagattctttttcagctgaggatgcttctctggctttagagaactggtcctggacgggggaagcaatttggcaactgagacaggaggatcacaaagttatccagggctctacaatcggaaccttgcctcaaacaaaacaaaaagaccagacccccttgattgagctggatccctccatagccgctgcctcctgtcttttagattattgtaactgggtttaccctccctgtctcctctaagtagctgtgatttttggatatggctctgggaatccgtcagctctttcatgagtcctgaggtatttggagtcctagactttggtgaaaaaaaaatccatctttctgggcatgcttcttatggtctgtctatttctcaagcttctaatattttaaactcagttggatgtgggacccaggtgcccttattctatccttcttccctaagacagcttctccttagtggatgtgtacgaataccacatgctgtctgggctggggtgtttacctcacagtcacagtatctggatctcagcagcgccctgtcctcagggaacccatggcctctgtaccctgtcaaccaccccctccccttctacctaccacaggtcctatttactatactgttcagtccatcccagataacttccccataccacagttctggtctctttgaagccaggattccaactttagccaaaaaacaaaactatgatccaatcaaagcacagatgacggttgacagtgtcttttttttttttttttttaatcctgtgtgtaaaattcaccaccgggataaagtctaaaaatccttagtactctaagtccgcccctgctggccttctaactggtctttcctctctggcactgttctccccccccaccccagccccttcccaaaccactcccatcccacttcgcagttgactcctccccttccttcctgagagtctaagtcagattcttttaaaattttgtgaaactttcttaggagttttccttgtaattgcacatttctattaattagcatctcttccccctgggaagccagtatgctgtgtgctttaaagggacctgggtttccttcacccctgggtatccccagggctcggcactgcattcacaagcattctctagtgtttttggagtgaagaacctgtacgcacgtggtccggtctctttctgttattgttcactacagggtttctctgcataacagttctgactgttttggactcggtttgtagatggggctggcctcaaactcacagagatgcctgcctctgcctccccaatgctgggattaaaggtgagcaccaccacgccctggggactggtctcttctttatacccannnnnnnnnnnnnnnnnnnnnnnnnnnnnnnnnnnnnnnnnnnnnnnnnnnnnnnnnnnnnnnnnnnnnnnnnnnnnnnnnnnnnnnnnnnnnnnnnnnnnnnnnnnnnnnnnnnnnnnnnnnnnnnnnnnnnnnnnnnnnnnnnnnnnnnnnnnnnnnnnnnnnnnnnnnnnnnnnnnnnnnnnnnnnnnnnnnnnnnnnnnnnnnnnnnnnnnnnnnnnnnnnnnnnnnnnnnnnnnnnnnnnnnnnnnnnnnnnnnnnnnnnnnnnnnnnnnnnnnnnnnnnnnnnnnnnnnnnnnnnnnnnnnnnnnnnnnnnnnnnnnnnnnnnnnnnnnnnnnnnnnnnnnnnnnnnnnnnnnnnnnnnnnnnnnnnnnnnnnnnnnnnnnnnnnnnnnnnnnnnnnnnnnnnnnnnnnnnnnnnnnnnnnnnnnnnnnnnnnnnnnnnnnnnnnnnnnnnnnnnnnnnnnnnnnnnnnnnnnnnnnnnnnnnnnnnnnnnnnnnnnnnnnnnnnnnnnnnnnnnnnnnnnnnnnnnnnnnnnnnnnnnnnnnnnnnnnnnnnnnnnnnnnnnnnnnnnnnnnnnnnnnnnnnnnnnnnnnnnnnnnnnnnnnnnnnnnnnnnnnnnnnnnnnnnnnnnnnnnnnnnnnnnnnnnnnnnnnnnnnnnnnnnnnnnnnnnnnnnnnnnnnnnnnnnnnnnnnnnnnnnnnnnnnnnnnnnnnnnnnnnnnnnnnnnnnnnnnnnnnnnnnnnnnnnnnnnnnnnnnnnnnnnnnnnnnnnnnnnnnnnnnnnnnnnnnnnnnnnnnnnnnnnnnnnnnnnnnnnnnnnnnnnnnnnnnnnnnnnnnnnnnnnnnnnnnnnnnnnnnnnnnnnnnnnnnnnnnnnnnnnnnnnnnnnnnnnnnnnnnnnnnnnnnnnnnnnnnnnnnnnnnnnnnnnnnnnnnnnnnnnnnnnnnnnnnnnnnnnnnnnnnnnnnnnnnnnnnnnnnnnnnnnnnnnnnnnnnnnnnnnnnnnnnnnnnnnnnnnnnnnnnnnnnnnnnnnnnnnnnnnnnnnnnnnnnnnnnnnnnnnnnnnnnnnnnnnnnnnnnnnnnnnnnnnnnnnnnnnnnnnnnnnnnnnnnnnnnnnnnnnnnnnnnnnnnnnnnnnnnnnnnnnnnnnnnnnnnnnnnnnnnnnnnnnnnnnnnnnnnnnnnnnnnnnnnnnnnnnnnnnnnnnnnnnnnnnnnnnnnnnnnnnnnnnnnnnnnnnnnnnnnnnnnnnnnnnnnnnnnnnnnnnnnnnnnnnnnnnnnnnnnnnnnnnnnnnnnnnnnnnnnnnnnnnnnnnnnnnnnnnnnnnnnnctcaagacaggtctttccttgtagtgccaattggcctagaactccctatgtagaccttgaactcacagagatctgcctgcctttaccctctaagtgttcggattacaggtctatgctatcacgcctggcttgcttgctttatttttaatttggttgtaaaagtccacggtgtaaaagaagtgcctgtaccatgccaaacgctgtctacgggctgaacgtcccacccctggcatggaaggcagggtcgaggatagtcacagcctccacttctaagccagcctgcctcaggtacccagctcatccaaggccactgctgcatggcagcttgactgactgacgattagtgtgtgtgcagatccaccaaagcccactctgatgctcttgaggctccaggggatctgccctgtgttctccccacagatagcctgagaacccaggagtgggcctagtgagaggccccataccagaggctcaggaccaatgatacctaggtagtttttttttttttctcttgcttttctatgtttgagaatgttaccagggaaggttctgcagcaggctggaagatcagcgatgggagggaaggatgagggtctgattgtgtgtgtgtgtgtgtgtgtgtgtgtgtgtgtgtgtgtgtgtgcataggactctgcagccagccatagggcccaggcctggatttctccattggtctgtgtcctgctaaagtcatgaggaccatgggggtaaggggactggcaaggtggaggccaggacctgttatagtaaatttagaaggaccagacatttggggaagggattcagtcctcctttttgcaactggtccaccatcttcccttgactttacaggaaaccaacatggtgtggcctctgagggaaatcagaggacccccgcagtcatattccctgtccgtcagttgggttcaacgtactggccttggaagaaggctgagttattctcctaagccatgtgcacagctgacttacttaattgcattctctttctgtggcttgggtggggcagaggtatgggaggactagattgccgagggcggtgatgcccatgtcttgcggtggagcctgtgtgatagacaggaggaaagaatgtggttaatgactcagattgcagcctcatctggcatcagaactaccagaggagcatctgagggacttcccaggctcttccccaactgctgaatctgtctctgcgtggtaccccaatgcatgtgtttttaaagccctaggggggatgatgctaaggcacactgaagcaggattcagatcttcacagtagaagcaagctaaagggaagcaaaagagagtggaactaaagaatggtccaggcttttaatgtgctgggctgcaagggcccatttctccgcctgtgtctgtcccctgcacctcccctcccccgccaccccacccctcgcccccgctaaaggcagtctttaaacattcctactttgtgcttatcaaacttgtatctatgtacctgtgttccatgaggctgctgctaccagagtatgaccaagaatgggcctggttgggctggagagatggctcagtggttaaaagcactgactgctcttccaaaggtcttgagttcaaatcccagcaaccgcatggtggttcacaaccatccgtatgagatctgacacccttttctggtgtgtctgaagatagctacagtgcacttatttataataataaataaatctatataaaaaaaacaaacagaataggcctggtgagatggcttagttgctgaagtgcctgccctctgagcatcaggacccagatgcccatgcatggttgtgtatatctataataccagtactaggggcttggcagaaacaagaggattcctgagtgcaccggctcagcccagtcactgagctccagtttcagtgagagaccctgctttagaaaatttgatgaagagctattgaggaggacatctgatgttggtccacaccatgctcagaaagagttcctcctggactcagtggagggaggagaccctctgcgtctatccaggtggcatacaggatgtgaaggcgtgttctatccccttgtggattcccatcgtgtctcacgtgctggttgctctccccggttcacctggtcagtgtttctttgcgcacttgccagggaacattccaaggttatgctgagtccagtgtggctcccccacagctggagcaggaaggctccctggtgaccaaggtgcttctcagcttctgcccaactgcttgtgagaagcagccccatccatccacatgcaggagtgggagctggccttcctcctctgttgcatgtccccccttgccatgaggacgtcgagctgtgagtgtgctagccagcctcccctcgccagctctgagaggctggagaagcttctgcagaggctggcctgcagccatcgcaagcagctacttctctgaacaccggctagtttgcggctccattacagacatgcttatatacgtctatgggtgaatgccggtggtgtaactgttcttccaaggaggagtctggggtggtttctggagcaacactctgggctgccgagtgggatgtggtggcaggagcccaattggattgcaggctgtctgtcctaagccacaagggtattgaattcagaccatgtttgttctctgggagcattcaggaactttctgtccactctagtggcctgtgtggtcatcgataggagtggcacaggacatgtttacatgttgaccagtggctgtagaccccgtctgagggggcggggtgcccattgcaccagaacacagacttgtatcttctgaatgcatgagctccatggaagttagggcatggatgtctcagtggtaagcaacgcttggctgctcgatatttgacattaaccagttctatgcggcttgtccagtgcttcccagctggcaaacagcagtgcaggtctggaatcccttcccactgtgacccccggccttggtggtttctgttctttctttccgcacacagagattgaacacctgctgtctgctgggttttttgcaggctgtctgtatatgacagttatgcagataagcacatcaccagtcctgagcacacacagcctccattcatggcaaaggccccactaagtgccatgaaaacaaagctgtggctcagggaaggcttcctggaggaggtgacattctaatggacagcataagaacactcaagagatcccaggagaataggatgtggattgacatgcctgtgacaccagaggcaaggccaagaggacatggcaagactgagaccgggatcgactagaggcagttccaggctaacctgggcaacttagtgatactctgtgttaattaagaagtaaaacagagagccgggctgtagctcagcggcggagtgctggcctagccgcaacagaaccctgggttcaagtcgcagcactacccaagggttggtgatgtgttccatcactagggaggttgagtcaggaaaattcaaggagggaggagagaaaagggatgggatggacaaacacgaataaactggtacaagagtgggaaatgcaaaattatgttggggctggccagtactctgtgcactgcagccttagacaggaccttgccatggtagaatgtcttgttactctcttaaggctcagaccttaaataatctgaactttgaagtatgtttttctaggtttgtttatttatttatatatatatattgtgtgtgcgtgtgcctgtgtgtagggggtggaggttcaggtgctccgaggtgggctggacagtattatactgctgctgctgttagtcaacgtgttgatgcgnnnnnnnnnnnnnnnnnnnnnnnnnnnnnnnnnnnnnnnnnnnnnnnnnnnnnnnnnnnnnnnnnnnnnnnnnnnnnnnnnnnnnnnnnnnnnnnnnnnnnnnnnnnnnnnnnnnnnnnnnnnnnnnnnnnnnnnnnnnnnnnnnnnnnnnnnnnnnnnnnnnnnnnnnnnnnnnnnnnnnnnnnnnnnnnnnnnnnnnnnnnnnnnnnnnnnnnnnnnnnnnnnnnnnnnnnnnnnnnnnnnnnnnnnnnnnnnnnnnnnnnnnnnnnnnnnnnnnnnnnnnnnnnnnnnnnnnnnnnnnnnnnnnnnnnnnnnnnnnnnnnnnnnnnnnnnnnnnnnnnnnnnnnnnnnnnnnnnnnnnnnnccaccccacacacacacactttccttcatctttcctcactatgagcttgggttctcctggtgctctcaggatgtgccaggttcttagggaaggtcctttcccttcatgactgacatactttatacagtcaggtttgtgctcacagatgagaaacatacccagaggttttgacctaggtctagaaagtaggaaaagatgcatagttttccaataaaagtaggctaaggtgtaattaggggcctagggcctgcctccgcaaacaggagcagggatcggataggcagcctctttagcaggagcagagtagcacccctgtgactcggcgtggcgaccgtgtatgcagagcacctccctaccctgttaagctaagccttctcctgggataagaggtggcttccttgacctttactaagtgcctagggtgagtttgcggtagtgcttgttgttagatacttggtaaacattaccttttggatctattagcacatcccgaggtataggctgggccacttgtttttgagataaggaagacaggcccagagaggtcagattggctaactgaacctcgatcctgtgttgtgatgccccttccagactagacacccttgggtcaggaggcaaggacaccgtttccactgtggtcccccccccccccccccccgcgttgtagtctccattgagtgagttctagcattgagggataaattgaggctgagtaaccttctaatcgggaaaggtgatgaggcccttagatttgtaggactttgaggactgtgaccttacaatcagggtgggatctgatttaagtacttgtccctaagccaggggatataaagtgacatgtgccagcttattgtattccatggttcctttattacactaaagatcagaagccacccaaaacacccccagccccaaagtcagtgttataggttagtttgagggtaaaggcaagaaaaataagattccagagttctaaacacaccctggagataggtggaatagttactgggccaacagggagcatatatagtggggaagtcaggccttaggatgtcttcccaggttagttttgatgcctttctgatctacagaatttcctaggtgctaagcacaaggaggagtaggggactggggcggacagtacgtcatctctgttctctgggtacagcatcttgcttggtaaggaacatgcttgtgaaatgtattgcagtaatgccaagcacagcacagtctccccaagtgccttcctacccagcatctagcctcgttccctggattcctctgcggggatagatcttcttcccattctagtggtgatcactctgagttggcgaagtcttgaccaaagccacagttctgggctggggctgtatgtaactcagtttgtagagtttgcgtagcatgccaaagtcttgggttcatctccagctcagctgaaaccggatacgcccctgacttcctggtacttggatagaagagacaagaggatcggaagtttcttcttcaattgcaacagagactttatgaccaccaggcctacatgagaccctgtctcaaaacgacaaacaaaaatatgtctagattcttagtagaaaagtctagcgccaaaccagactgactccatctcaacgtgtccctgtgctaataatcaaagcagcattccatagggtgtccccatcgtgtggcagaggccacttccaccagaaaatgtggctatttgcagccttttgctcacgtgtcgtggagccactgtaaaggtcagagttctgtttgtctgagtcacttctctccttccctgtgtggggtccagggattgaactcagttcatcagggtgacagaagcccacggagccatctctccagccctcccacagactacccagctgcagcgtgtggccaagcctggttcccacttagcgtcttagccatagctgctccttccattgtaagagccctccctggtcagatactcttagggtcaagtatgcgcagaagacgggccttgggtagtgttgctggccaccctccagtgctgttctctgtcactgatgattttctgttttcctttgagcatcaatcgtgtatttatcactcactgacttaggatctgactccccctgcacgtcggagggcattggcattggttgtctgccatgctatttcttaccgcctagcttgatgtctggcatactgggcctgtggtctaagcaggtaactttcctccagaggaaaaaaagaaaacccaagcagcatctttagaagtgacccacaacacacacctagcagcgagcgcttcataagatattactcatccatatagcgggtgctcagcacagtttgtatacaaagctcttcttacagatagttgcttagggttttgattagcgtgggtctcccacctttctgcctaagcatccctagttccttgtcatcaccccggttctcagatgccttcccaccctggttgtcttcttcctcgcagtctgcccttgaagttctggaatttacagtttggtcttggaggtgcaaatggggtttgggacgctgccatcaagtgcctttgggtttttccccacttgtcttaaagtttttgttacgttttctgggcagttgtgtgctcagacatcggtgtcatagcatcatgtggaggtcagaggacaacttgcaggagctggctggttctttccacatgtatgcttcaaaagtcaaactcagatcattaggcttggtgacaagcagcttcagccaccgagtgccccccactcccatccttggtaggagagcttgaatataataaggcttgttagtacctgctaggcaagcattctatcagtgagccacaccccccaccatgcctgctcttttttctctcaacccagcctgaagagcttagctttgtctgtgtgggctgcagtgactgaggtaggtggggtgtgctctctcggagactggtctccccagcattgtcacctatttccagccaactagcccctccctgactctcacagtcctaaaagttgtaacattttgttctttagcattttaagattaaagcaagcccggtagtggtggttcaggcctttaatcccagcacttgggaggcagaggcaggtggatttctgggttcaaggccagcctggtctacaaagtaagttccaggacagccagggctacacagagaaattctgtcatgaaaaacaaaaacaaacaaacaaaaattaaagcagttgctgggcagttggtggcgcacgcctttaatcccagcacttgggaggtagaggcaggtgagtggaatctctgtgagttcaaggccagcctgctctatagagcaagttccaggacagccagtgctacacagagaaattctgtcttgacaagaaatgaaacaaaattaaagcagctatagacctgtgaacaacagctaactcaatctgcattctatttttaaaataattaagtataggtcaggttccactagcaagaccaggcggagaaaaaacggcactctggagctaaaccaagccaggcgttccccttccccctttccttcccctcctccctttcccctccctttcttcccccttattgccctcctcttccttctccttttgccccttctccctgccctcccctgctccttccaccaggagttttagcataagtatttgatttgtccacttaggcaagttgaatgcatcctgttaggctagggggaaagggctgattaactcacttcttatgcattaccgtggctaataggcgaggctcttctgcgtgattgctgcccaaatcatctgctccccattggagcttgggtgccagacttcagcaccaggaattgctcagctcgtgtgattgaggaggctgcttgtcaggtctggtcaaggtggcaggaaggaagccaagggcaaaatttcttctctgaggctattagacttcttgtctatttccatgccttctggggagtgtaaggcctggttgagaggaggtccagctctagtctgggcactaccctctccgttccttttatttgttccagttttctcctgcttcaagcagttccccctggatagctgagccctaggctgagaggacggggaacagcccaaggtttccatcacagactaactctgatctttgcatatataatggttggcttccagctcattatgtggctgaggatagctttaacctcttgattctcctgcaactacctcctgagagctgggactactggcacttcatcaggcgtggcttatctggtgcttgggatcaaacccagggtctcatgtgtgctaaataaacattctaccaacttagctgtagcaacatcccctaagtgtgtttgtttgttttggtttttgcaaagccaattggaagtggggtagatctccaaaccaggagactccagtgtcctggcctgtgagtctgaatgctttttgccttcagggtttagggtggtcacagtccttgagttgccagtctgtgggcctttgaacagtgaatctggggaagtgatctcacttgtatctttcagtcaacatctcaaggtagaaaccccagggagtgtgcccagcttcccacaacaggcaaccatgagcccactagtggtcacagcatcacttaggtctaaatctcctgtctgatttcagcagctggttactggcatccctcagttggcacatctgctctgcccaaccgtggttcgagtagaaagggagtcggccatctagaaatttctctagaacgattgcccacctccagcctgagtggctttgttcccatgtgaccaggagcacagactgatgccagcccctctgtgcagggagcctgggaaggtggactgagtctttagacctgtcagaggctctcagagggccttggtggacaggaacatgctcctgggaatggtaggggagggaaggtagccttcctgtgacctgcaatgtcatgtggggtgaggcatagaccgctagctgccttgggaagacgtgtgaggttgggggcctgggaatcctgctttggatttgcacttgacctccatgaccattaaaagttttggggaggaataatgctccacaatgtaacatcactggatctgtggcccaacccttctgaatccagcttttctattgcacagggacagtgctgcagctctttagtgcgaacatatcaaccaccgtaggtttttatcaggaattacactgtgggtgagtgaggtgaggtgtggggtcttgttagtggaggtggtttctgcccgttccccctaccacagtcggggcttgggtgccattgggtgcttgctctctgagatgactgatgacactcccacatttggaacctcacaacctgggccgctggggactacttttataatcgtggtgtgcagaaagagcctagctgatccgtttctccgttttagttattacctagaataatgaacagttttgtagttttgcacgctgaaacctgagctcttccacgtctaaggtccctgtgcctcctttagggagtcctggctgaggggatgttcatagacatggaattttaggacctcatctctttattccagccccactgcccagtgtgtaggctggagggaggatggggcagaagcccagagtggggaagcaacttctaccagggcacacagcaaattcagagatacagcagggacagaagccaagcatcttgcagtgtgtgggtgccttttgactaaccggcccttttcggctatctggactagtgctctgcggctgactgtatgccagcccctaccggaagacaggaagggaactgttaagtgaatggagcctgctacgtttgaccatcacctccggcctcccaagctctctctccgcactccatctctctttcatcaccgtactctcctccttggacagccagtcagaccctacagctgctctctaggctgtttccagcttctttggtaactttctgttacttgaaagttgagcgggaccagggcagggccaggcaaccagggaaggtttggttgagatgggaggcaggaacgaggctttaaatggagggctacttggggcaggaattcgcctcagcagttaacagcgcttgcttgctactcttgtcgaagaccccggtttggttcccagaatctacttgtggctcactggcgtttgtaacaccagtttcaaaatatctgataactgtcccctgtgagcatgcacatagtacaaggcatgcaggcaaagcactcataacacattttttaaatcttttttaaaaattaaagataagaggaacgcaaaggctgggggcagaagctaggtatccttttgagcaagcctggccagcaccgagcctttccagtgagtggaagcgtccctagcaccgaatactcctgcaaggaaagcacaggcgaaatcacccgaccgcgcggggaagagtggggaggagccagggacaagaacgagtcgcagggctggcgggctggtgcagtctcagcctgccctgccagctggacctatgagccagcctgatcttcctcggcccgccctcctgcctctaagtaatgaggatggcgtcaccgttgcccgcgccacgtgctcccccgccgcctgcctgcagagctgctttgtacgtagcagcaaaaatccgaagcccggagaggctttcaattctcggggagggttttgtttgtttttaaagcgaagaaggctcatgcccctggctaagatcctgagaggcgttgaaacccccaagccctggcagccacaaggctgcaggaacttgggaggatggtggatgggccgtgggttctcttacttttggggatggcggtggggggcagattctgacctaggacaggagacgtgttgtggcagaaaagaaaaattaatcacccgggccagagttctctgcccagccgcccatcccccccccacccccccccaccccggtcctctgcagaacatcaatctctctggcccacttcaccccatactgagggccacattttaaaaattgaagtaataagagggctggagagatggctcagcagttaagagcacttggggcacttgcagaggacttggattctgttctctggactcagatccggctcctcacagccccctgtaattcctccaagagattgccctctgcaggctcccctacacaagtggcattctctcacagagacacataaataaaacttttaagtttttttttttttaaatctatagatgggatcctatgtgtagtgtttattttcaccgagtgtgcctacaggcaaacagtatgtgtgtgctctgagtaaagtaggttttgtttgtttgcttgctttttgttttatttgtattaatgtggctgtgtaattaatgcgtatgcatgtgcctggggagactagagagagtgcagaatcaatccactcccctccccagctggagctacaggcagttgtgagcctctgaccctggtgctgggtaccaaactcagacaagagctgcaagtggcttgcctgctgagccatctctccagctcctaaaatgtacccnnnnnnnnnnnnnnnnnnnncgtttattatctctgcctcaaacctcaagtgactcacacagcgtggccttctagctaggaatgggatctgccagcagggggtggcccatttaaaagctgacctagttaaaatccaggagcaccaaaaaacactgggtcaatctgatttgagtcttctgttcgaagcctggaacctggaacctaaattggtcagggactgacaaggttgaaaccaaaccacatatatttatccaattcttgttcagtaaaggaagcacaaattatgtctggaggttgggggtagaaaaccaggcaaagcaagatgtagaggttgaacccagagggtttgttttgaatgctctccacagctccagagcagggtgggaggcttggggtgttgggctcagagcctgtggcaggaaggcatggaggactgggcctggttaggagccttcattccctgctaccatcttcagtgtggacaccatgggcagagccagtggtaaaggggatggtgggtagcttttttttcttcaagctggcaaaattctaggctggacttcttattgtgtaatccggccctaggtcgttggcactagaattctgagaggaaactggaagcccagagaggtgagaagggtgagagaccagtggttcccactcttcttaactgattgcaaccatacaattttttgttgctacttcataactgtaactttgctatagtcacaatgtaaatatctgtgttttctgctggtcttaggcagacccctgtgaaagagtcgtttaaccccagagaggtggagacctacaggttaggaacagctgggctagagagaggaacttggactagagccaggtctgtctggctagagtccaccttctgcccatcctgagttgccatagaagttctgaaaaagtaaggggcggctcttaaagtgtcctttccccctgggtcattattttttttagtaggcctgtcgtagacccaagctgtccattctaatcagagccagcgccacagccatgtgacctacacacatagttggctgtcactgtcttagaattctatgtgaggctttgttttgtgttttgttttgagatgagtttcacatagcccaggctggtctcaaactcagtgtgtaactggggatggtattgaacttgtcatccatcttctaccaagtttatgtagtattggaaaaatcaaacaagagactagtacaggctaggaaagcatatgctatctaccaggtaaatttccagcaaggagcccaccatctcattttgcactgggctatagttacatagccattcctgaccaagacagcgcctctctcttcccggtctccgggtacctcttatctcccctcgtggcctttcggggctgtttaccagccagctgtggatttccagcctgccaccagctctctctctctctgtccgactcctcctctaccccacatcttggatcaccatggattctgtgacccttcagccaactatgcggcaggagtgtcttatgtagggagaactgactggagtgtgctgagtgctgcgtcagtttggtagggtagcgactgatcccatccgctgtcagggctggtgcttgattggcataggcacacacccaaagctgttgcgggaaagcatgagcattgatcccacctgctatagtgcactgtttatgcttatgagctgtttgggcccctcccccctctctctgtattcccagtacttattatattgtgcctggcccagtaagagggacatttgctaagcagtgctgtcccatgcgtccctctaggctgattatggggaaggacagtctctgacctctaggagggtcagatgcttaatatacgattaaatgattcatgctgctgcctctgagatcgctgcccagccttgggttcttagagccagctacagggacggcttcctgggagggagtcttgaattagatttgggtgcaatgggtaggtgacttgggggagggggaagcggccggctagtaggtcactaaccagccgtgagtgtttcagaagctggctagagtttgcagtttataataggctaagccgatgccaccgtccttttcctaaagaggtggaatcttggactccagagaacatgatatcattcagcccagatcagggggtcttgcatccagggtgaggttggtcaacagtagcccaggctatctcgtaaccacatccttccctgaggtcacggccttcaagacaaacacgcctgaagtaactagggctgtgacgaaggctgcagcgttagagagaagaaaggtcacatctgagaacttcgtaaggatcagacttggtggttttgaaacaaacgagttgttgtgttgcgtgaatgtgtttgtgtttattatgaagttcagctttcactggcaaggaacgaaggcagacccaagtctggggtgggggtctcgggtaaggtttacgaaggggagagccagaccaggctggcttcttatgtgaatgtgtggtgcctccctacagccagcagaatgtgaatgtcagcctcctgcctggggctgaacgatcctgtgtaagcagaatagccctggcctctggggctacagaggtaactgagtgcactggggtgctgttgttgttgttgttttaagggctagtggcagttgctgttgtgtgttaagggctgctggaaccgggagggcatctaaacccaaagtacaaatattcagtttaattttaacttgcagtttgctcacactcaggacttggcaggggaagtgggcctttattctatttttttttttttttaaagcacagcacttcttggatacaaaagggatgctgtcacatggaagggctagagaagaggctgccaaggacggaggaagtgggttagaaatgataacagttgcagggtgagtccccttggtcgcaggccttgggagagaggagggggtgggggtagagagagggcaggcagaagactcaggcagacgatggctagggttttccgctttgtccggtttgagccacttctcggcctgcgaggcttgagctttctacacaatactgcgatcttcgggtctatgccctggccaccccctaaacagtgccgggcacccttactgtctgtcaggaaggaggaggtgcagaaaagcaaaggagactgggaaaggctacctgagactttgccagagggagaggaaactcttgggggccccacacccagccggaggaggccaggttgagctctgcaccttggtgactgaggaggtgggtgtgatgcccaccaagctggtggaacaggaaagggctgaaggaaagccattacagccatggggacctatggagttgggtgatctctgggcaggcacagttcctataccttggaatgtcagagatgcctcaggggaccgcgctacattgagcagctagcctgcattgacctgtttgcctaggcagccacctgctgggcctgcatttcaggctaagtatttctttttcttannnnnnnnnnnnnnnnnnnnnnnnnnnnnnnnnnnnnnnnnnnnnnnnnnnnnnnnnnnnnnnnnnnnnnnnnnnnnnnnnnnnnnnnnnnnnnnnnnnnnnnnnnnnnnnnnnnnnnnnnnnnnnnnnnnnnnnnnnnnnnnnnnnnnnnnnnnnnnnnnnnnnnnnnnnnnnnnnnnnnnnnnnnnnnnnnnnnnnnnnnnnnnnnnnnnnnnnnnnnnnnnnnnnnnnnnnnnnnnnnnnnnnnnnnnnnnnnnnnnnnnnnnnnnnnnnnnnnnnnnnnnnnnnnnnnnnnnnnnnnnnnnnnnnnnnnnnnnnnnnnnnnnnnnnnnnnnnnnnnnnnnnnnnnnnnnnnnnnnnnnnnnnnnnnnnnnnnnnnnnnnnnnnnnnnnnnnnnnnnnnnnnnnnnnnnnnnnnnnnnnnnnnnnnnnnnnnnnnnnnnnnnnnnnnnnnnnnnnnnnnnnnnnnnnnnnntgaggaggtgccgtgtccccgtccccgtgtcttccccaccacacacacacacacacatagaggcaacttccctagacattcccttgactgcccagcattaccttcccaccccaggtcctcttatgcttgctaatggcattaaggggagaggccgtcgaaccactctaggaaaaccacagatgactgcagtctctgaggagacaccgggatctgcccttggaagcagggattccctggaaagccagttaaggagaaagcctgtgcacaggagtccaacacctcagacttgtgtcccttgcccacagccgctcttcctccatttgctcgatgccctcagccaggcctttctctgcaactgtcttgccctggggtgaaggactccaagagcttcattcttacactctaactgggagtggcttgacctggacccgtggcctcttagatccatcgagaagatggatggagcatggccagggcagaggcttggagctcatgattcggggaggaaggtggtgtggtgttcctggctttctttccttcagatagaactgtgaatccctgctagggatggggctgtcctgcatggagcactcgctgtctctgcagggacccaggtgccccatagtccctgccctgcctattagcctggagtgaaccctgttgtacctctgcagagtggctgaagacaagtggtctctggaagaccagaggactctctaggccaggtcctcttagaggagaagtgcagccatgggtggggactggctcgtgagctgtttatgcagggtggtggtggggaggacagtggtgaccctctgagacgtgtgggcctgtggagaaccccatggatggagggtgcagcacgtccagtcagtattttccatgtttcccagaagctgcagggtagaagctgattctgaggcggagtcctggggtgcaggggtgcatgggggacaagtgccatcgggaggggtcagtcttctccttttagagtcctttcagcctcaagccaactctaagatctctaatcccaactatttcagaagcgagtcaggattacaaattgaaggccttttaaagctatgtgcagggacaattcagatccagtttaggcgactcagagaaagactgtgtcaaagtaaaaaggggtgggggtggggggagtgaactaaagggagcaggtgcttgcttgccttgcatatgtgagcgcctctgctcaaccctcgcttctataccacagtaaggttcctggtatcaccaagagactgggttccccaagcacctggcttgcccaggattaccttggtcggcctgcggactcctttggctgtttgcgccttttctgagacccactggctttcccctgacctagcatccatttgcggtgtttacccgagccagcaactgcccctgcagtgggtgtggtttggatcctcacgagtaacttctaccgtctcttgccactttttgtcagaaacagagaaatacctcccagcaccaccctcctgtccttggagagggagtgggtagggaccctcacatttaagtacgggctgtcttaggagtacaggctctctcatcctctatgaggcagggaccaaggaagacatccaagagccatgtggtccggtaactgtgccttgtatctctgtatacctaatattaaaataacaccaagtgttcaggaccacacgaggcttgtggctccattcttggacagcaccaaacacttcctttctggtgggaccatctgctggacagtgctgtctcggcatgaggatgtggacgagggttctctgctatgctgcccctgtggtggagcaggctggggacctgattacagtgataagggccaggcctcagtgaacaggctgaggccagagggaggagggagagcaagcatgagtgtattgtgtgcaagccacgagcatttggcaagggggtatgggggaggtggtggtggtgggacagggatggggaccacaaggtgtggactgaaatgagtagcctgcctccagggagtatctggcctgggcattcgtaggcagggataccaggtgtcatggctacctccattgtggctgatgcctgtgggcagtagggactgtcatttttattgtatactgggatgtgtagcaggggcttattcacacatgtgcgagcatgtgcacgcactcacacacacacacaccagccttggtgacagcaaagcctactggatatgttctctgcagaggttccccagttctaaatatttatttattgattttatgtatttgagtacactgtagctgtacagatggttatgtgctttcatgtagttgtcgggaattgaatttttaggacctctgctcactccagtcaatcccactacctcagtccctgctcactctggcccaaagatttatctattattatacataagttcactgtagctgacttcagatgcaccagaagagggtgtcggatctcattatgggtggttgtgagccaccatgtggttgctgagatttgaactcaggaccttcggaagggtagtcagtgctcttacatgctgagccagcccatggctccccagttctagaggtgtgcttatccaacattctccatctgggtctgtctttcttaatggtagaaagatgggtagcccggtcaccctttgctccaaggcagtgctgatctggataaggcaattgatgggacgctggagttggaccgcctctctgaccccttcactcacaccaaccttccttttccaggtgaaagagctggtcctggataactgtaagtcaattgaaggcaaaatcgaaggcctcacggatgagtttgaagaactggaattcctaagtacaatcaacgtaggcctcacctccatttccaacttaccaaagttaaacaaactcaagaaggtaaacaggctgggagctgggaggctccgggtgggggcgccttgtgctccgagagcataattaagggctaggccagttgcttgcttcaacttgctggcagggtccctggggatgttcccttcccgctggctgcctggggagagtagccccgagctgggtgttaagtgtactttcccttcctgcctcatacagcttgaattaagcgaaaacagaatctcaggggacctggaagtattggcagagaaatgtccgaaccttaagcatctaaatttaagtggcaacaaaataaaagatctcagcacaatagagccgctggtgagtcccttggtcctctcctttccttgggggcggtggggagcccgactttcatggttttatttatttatcactgtttttctttgactctcgtcctgtgctgtgagctaacatgggtactatttctgcttagttcacggagaattcagttggaccaaggtcacctggtcagaatgggcacccagtgtggggcagggaatggagcctggtgtggtgtgtgcccttcagcccgggttgtggtatgtctgggctcacagcctggctggcttgccaccctttgaggagaggagcaaacctagatgtaagctgactctggatgtacatcagctatcatttcttccaagggttagggtttagtgctgacacagacgtggcattcctggagtctgaggctgtgggtgggaaagcccagtgcaggccttcatttgcatatggagagaagagtgtctgtcttggtgaccagggcctcagagacaggatggatgacacttctggttcttgctttactcattttccagttagggaaattttagtcagaatggcagtctcttgttaccaacgtcccaggtgcagcgttcttttggtttttaaggaaaccgcccgaagatgtgacaaaaagaatccattggaaatggagaaaagttgcaaagcttgacttgaggaagggccagggatgcggcaaaagtgactgttccgggttcacaaagcactcatcagtctctggacatagtgagctcatggggccaggtggtcataacagcaagcaggcgttgctttttcaagctcagactgtctgtctgtcttgctaataaagcacactgaccacaggaagttctttccaggtctcccactgacctaagtgaaggcagagctgctttcatctgctgggaagccctgatgtcatccttttgttaggaagagaaacctcttcgaagttctgactcacttgtgttgggagtgtgagtacagctgagtctatacagtctgtctaacacagaccagagctcagatgtcctcttggcctttggcccctcctaagaattacctgagcctatatacaaaatagtagagaatcaagactgactctgaggggtctactcttcctagtttgacttggtccccatggcaacagggactcggtgagatcccctgaatgaggtgagaggtcaagattcagctgcatttcttgctagctgtgggcctcctcacttcctggagcctcgatagggcgtttcccccttcccgcccctttcccacggtcaccctcaccgttgactgcctttctccacttgcagaagaagttagagaatctcaagagcctagacctgtttaactgtgaggtgaccaacctgaatgcctaccgagaaaacgtgttcaagctcctgccccaggtcatgtacctcgatggctatgacagggacaacaaggaggcccccgactccgatgttgagggctacgtggaggatgacgacgaggaagatgaggatggtaggtgtcctggggatccgggatgcagagctcactctagacaagctggcaagccatctgccaccggttttcaaagggaagagggactggtggcctcaagtccccccagagaagaacactatgtatatctctatagtgtgatcccagacgtgggagaagagaccagttgtaggggtggactccccagggccttttctccatctgagaaaccagggtcttctgctggagaggctgtggcgccccctggtggttgcagcatgcaggaccactggcctgtgttgggcccttccgtggccctagggaagttgggggctatagtcaatgtcagatcccttgggaaggaaggaaaggctaagggtctctcctccctaccccatccccctatctccacaggccccctgcagttggcaccctgcagctcttctgcagggctttatagctcaaacagaagtactcagatagtgccagtcgatgtagacataaaattcttttgtccttgttggtctgggttcttctgtgaaatgttcatatattctgtcagcatcggtggatatcctttgcccaaggattagattatacgtgttcccctgttgcacacagtatggtgttgtgatatgtggcatgggtctgtagtacagccccggggccagtcctccaagcccttggccagttgctccactacacaggccacttgtggccttgaacagggcagttctctgaagagggattagttatgttgacttaagcttcttgctcaaacctccgtgtctctgtggccttacccacacagaggttcttctacatatctgacttggaggaaggcttatagcatgagtcattttttgtgtgaacaccacctgtgtgcattattaaagcagtcgggctctgagnnnnnnnnnnnnnnnnnnnnctcaatccgagttgtcttcttgctggccacccccacagaggaggagtatgatgaatatgcccagctagtggaagatgaagaggaagaggatgaggaggaagaaggggaggaagaggatgtgagtggagaggaggaggtaaggagacggggctgggcacctgtgcagtcccacctctgacctggcaggtgcctcattatcagtcgaggcaacccaggaaggagccttggttgtctacctcctgcccgctggcggggaaggaaaaggggtccgttttccaaaacttctatggcacagactttgctgcacagacctcagctgccgttctgaggaagttgtgtcagagtaaggaaagggaggggataccggaagcagaggctccgcgtgctttgggcggggcctgtcgctgaggaggtcagaggacaacttttgggagtcagttctgtcctttcactgtgtgatttctggggattggactcaggttgccaggcttggcagcaagcacccttaactcgctgagccggcttgccagcccctaccttttgttttctttctttctttctttctttctttctttctttctttctttctttctttcttttttttgttttgagactgggtttccttgtgtagctctggctatcttagaacttactctgtagacctggctggcttcaaacttgtagagatcctcctgcctccacttaccgagtgctggggttaaaggtgtttgccaccactccccagcttctgcttatcattgcaatagctggttctagccctgtcctgagctgtgctcgtttggacagatttcttgtttttttctgggtttcttgtcatctgtgacgtagggacctctcttactgggttattgagagtaaagtcacatcgacagaaggagtctggtgaggggtacagcagccacaggtctcaggtacccacaccttcctccttgctccatgtgttggggttctatgagtttggaggctcagggtctctcaaagcagggtagttttccatgagttgtttagaatgctgaatctgttcttgccactagtaaatggtaaccaagaaagatttgcagtgcacactcatgaaccagatgccttcgggcacacatgcgcagtacacaggccatagtctctccttctcctggttttctgcctccttgcttgtagtacacgtgcccacacagctcctgagccgggttcctggcctgcctaccccagggctcaggagggtggatgccagcagaaaggccaggctcccatctgtacctgcggtttctctgtcttctgggtttaggctgacagccccacctttaagggatacttgcaggagggaacctctttccttgaggacaaggtaatgggacatactggctggtggactgtcccttgtaccattcctgcctgctgtcataagagccccacgtgtggactttgatctacttttttgtaatctcattgaccatctgccctttctcagttaccaatgaaagagctcttaaatacacacccacaaacacacacacacacacacacacacacacacacacacacacacagagtcttcgcaaacagaccagggagagaactatccaatgatgtaaaagtgaatttacttcaactgttcttagaaacagccgctgtgaaaccatagaaaccaggccttcaggtacagagaagctaccagcatggaactcagggaatgacccagaacaaggaccctaggatgggaggatgaagtcacagggctggctgaatcccaagcaggttgaagtgaggttctcaaggacccttgagtctatccgccacacccaaaccctttagctgcctaggcttggctgtggggagggcccgggaaaggagagctaggcttgcccacttgattctggacttgctgaaactggggtctttccttgaagctaaaaccatattgaggacagatgcaagaaaggatggcctactttcaatgacagggcatctacctgcctagggagcctggtctcctaaaagcctgcatgctagcaagctgcctcttttctaggggcttcacatccagtgtttctaacatggggtagtccaaaactaccccacagcccaggtaaccctcagtatcttatttaatgtgggaaatgtcttaggtcacccacatattgaaagtcatctgactcaggtggttccttgatacaaaacagtaaaaagccctactgtgtgtgttcaccctgagctgcaggccttattgtgggctctgagatgggatgaaaggcctttctaggcagggacatctctaactcatgtaggtgtgcgggtatagtgtatgtgcttgcgtgtgtgcacatgtgtttgtttgtgcatgtaccatgtgtggaggccagaagttagtgtcaattttatttctcaatttctccgccttatattttgagccagggtctcttgttgaacctggagctcactggtttggctaagccggctgccggtgagctccagggttccacctgtctgtgtctccaaggtgctggaatagaaatgtgtgctgctaggccctgcctttacctaggggctggggtggagcttggatcagtgggactgggagctgcctccccagatccagcaggggcactgctaataccctgctgtctttctttgcccctaggaggatgaggaaggttacaatgacggggaggtggatgacgaggaagacgaagaagaagctggtggtatgtcagccttctctctcccagtggcagcctgacccctttgactctagcgttgccctgcttgggctttaagggccaggcgatgggagggggcacccacgcttcctggatgtgttctggttcccagtgggggtggggctgccgggaagatggctgcctgataactctccctttccctccatttttccagaagaagaagggagtcagaagcgaaaacgagaaccggacgatgagggcgaagaggatgactaaggaatgaacctgtttggggaaattcctattgtgatttgactgtttttacccatatcccctccccctcctattcctgccccccgaaacttatttttttctgattgtagcattgctgtgggaaggagaggggaaaagtgtactgggggttgatggggggtgggggtgggggggaggggaggaataaaatactatttttactgccacactttatttccccccctcctttttcccttgtgtctggttttgtccccataaatgcaatagcttagtgcacaccaagcaagtgtttgttcttactctctggagaggatggcttggaggtctaacattttctggtatgtcctacatccccagagttgatcgggaggccgtggctggcctctgccaggtgactcacagcccctgtcatcttcactaactcctgttctggttccggttcgtgtggtcgctgccagaggcacccagcaccccggtttgtaaatagcaaccaaaaggcgtattttggcactggtttggggacagtccccatctctcatcccttttccctccctccacagatggcagtgggctttgctttttgcaaagagaactcttattactctggggctatgatcccgagagccaaaaagaaaaaatcaaaataacaacaacaagaaaaaaacaaaaaacggcagggttaggagatacttgtaaaatgggaaagaagtgaaccttcatgtttcagcttcttaaaaacaaaaacaaacaaaaaaaactgttctatttggttctgtaaaatattagagcaactggttttgtagaaatggcaggaggacgcatctcaggcgctccagcttagaacccttttacaaatctacgctctggagctccctccgagagtcctctggggttttgttctgcttgttttccttctcacatacattggagcacaggaaaggaatgcaaactcgtattttcttacccggtgggactctgaaatggccgcaggtttctcctagggaatgctgtgtgccttctgcatccttcttccagatcgctttagaagtgacgtgctgtgtccctcctaccctgcgtctcactggtacagaacaactgccactcatttttctcccgcccttgagaagagccaaactttgagttttatgtctgtttgtcattgataaatttcaataaatcttttttatacaattttttgggagatggcttcctttgagtctttacaagccattgatcgtcctagggtcacctgctggccctggagggaaggcttgtaatgtcacctgctaaacagctttcttacagagtaaatagccttacaccgagatggagggagaatttttgttcgcaaagcagcaaaaacatatctgggtgggatatgttctacttaaaggctacagtctttaaagtgggggatggtgggggggggggaagggtacaaaaccttataaataaataaataaataaataaataaataaataaataaggcaagccgcctaaaaggcacaccaacaataaatagctcctgttcttgtttttaaaatatctttggttaattttttttccatattgtaaaagaatgtatgcttaaactcaggaatgtataaaacatttaaccaaccctagacttaacagctggtatttattgtattttttacttatggtcctgggtctctgttttttttgggttttccgaagcgctcaggtggttccctgctaatcccatggctgggttctgattggatttattgtaactaaataggtagattgttgaattatttccagtttctcctgcagcatccatccttcccataagtaatcacacttaaaatctatttaagtaatcataagtaatgataagtaatcattttaaaatctatttacattgtgtgtgtgtgtttcttgtatgtcagggcaactttggggagtcagtttctcatcccatcccgtaggtctcagagattgaacctgaggcatcaggcttcacagcaaagacttgtactcagtgggctatctccagctcaccaagcccaagtacttaacatctttcatttttctttaaaaaaaaaaatattagttttctcagtaaatcgccctggttggcctggaactctgtaggtcagactggcatcaatctcctagagatccgcctgcctctgcctaccaagtgccccccacagattcttcatttcttcatagtcaactcttagacaagatgctcattgggccaaacctctcctagcatttttgtaacggtcatgtatgagattgcctaaaacttgtcagaccagggatggcacactggctgcgtgaccttcttctcagccatacagctttgcactccatagcaagcatcagctatcttgccatcatggcagggttccagtgactcttgtacatgtctgagaagacctgggcctcacctcaccctgacacctgctcttttagactagctatctctggcttcagaagcagagtcaggtggtctcctgcaggctaagctatgtggtcatgatggggaagccaggcaggcatgtctttacaggaaggtatcaagaacatgggcgtaatgtgtcaggacagatgctgtggaccccagctcctctgtggtggctcaattgacatggtgtgagtaatgaagaatacgttttgcaggcagcctccaggggactccctttctgcatcaggccaggtatttccatccacctttgaggaaggttgatgagaattctagggagatgctcagtataaacatgaggacctgaggaccttcagcatccattgtctaaagctggatgtgttgtgtgctgcttgtaacctagcactgagaggcaggcaggcagatccctggggctcactggtcagcctgcctagcccacttggcaggccccacactgtccagagagactctgtgtcaatcaagatgaacggctaggagcaccctctgaggctgacctctggcctccacatgtttgcacatacgggtacattctttgttccccttgaactcttcccccgtaaatgaggaaggctgggactgagtaccttgagcataatatgtaaaacccggcctaccacacggtaagtttttagttttgttgaatggaaaggaggaagagtgggctgtttctgagccttgaccctgtggccagcccagaacttcaaacacagccagtccagcgggttttctcagagtctcagagtgattcagtgacgtacagaagagccctgagaagctgagctcctgtctagtcccagagccttacactaaatccccctactgactgtatccttgacttgtgcaagactgctgggtgaggcatcatgaactggttcctcagctcacaccgtcacgactgtggtcaccagtgtgctagtaagtgctatatggataaaccccaagaggccagttgcccagtcctagatgtccatagtggtacctacctgtaatcccagaacttggcaatcggaggctagctcaaggccatccttgtctgtataacaagcttttggacagcctggttacttgagaaattgtctaaaaactaaaacaaaagcctcctcgttcaccccctctaacttggtgaagttcagggaggacaagtggtgggcccaaggtcacatcacgggagagtggaagagcccagcctcaagcccaggatagatagcttttcggggctttggtacactcctctgcattgaggctggaggtataaagtgcagtgtttccagtaggagccaaccctacaggtttcgcatggcaataggacctgtcatcagttctccacattcccagagcaatgggtttccggttcatctcctagtcaagccattgtctggagaaaggatggtggcgtcatctgtggtgtggcctccaggctgcgtgctttgagaccgccactccctccagtctcctagattgcacaaagatggaaacggagctttagcggcaaggtgactctccagcttgtaagtgccttaaaaccccagggctctggcaccacatggttcttacttatcctgtgttagaagtgctagcaggcagatgcaggccagaggtgaacaattcaggctctcgtttgctgacttgcaaagactatttatatcctggtcccaaaactcattgttcacatttggaaggattcccaccctgggtccctaacaagcaattcctgtggatataggctgggcataggcaagaataggacagagagaggctggagatggagacagatctgaagccagccaggaaggtgttagcagggtagagactagagaaagccaaacccaggggggacattgtcactgggactgcaggagcagacacaggaacataacaaacaattcctcttagtggggcaccgttggactgtggacggcccagtggatggggacattctccactccagatgttcagttagatgatgtcccatgctcactcacaaggacagcaggtgtgaaggagcccctgcctggtgtccagagacatgattggatagtggtagagtagagacagtttggttattgtttgaaagacttaatgttttaaattatgcatgtgtgtgtgtctgtgtggggctatattcacatgaggtgcaggtgcccaaggaggaataggaagtcagaaaccctgaagttcataggcagttgtgagccacccagagcagaggctgggaatccattctgcaaacacagaagtatgtactcttaaccacaggcgcctctcctggtccacagagacagttattaataagaccattctcaggccatgcatgatggcaaacacctttaatctcagcactcagaaggaaggaggatctctgggagttcaaggccagcatggtctagtccagccagggccacaaagtgagacccagtctcaacaaacaaacaagcaaaaaaccaacaaccaaaagcaaaacacagatcttgctgcacggaactggaaggaggagcctggttgtggaggcacgtcttccagggaaaggcagcctgtcaccagagccaggaagccatggaacttaacatcccgtggcaccattcagccttggtctgaccagcgcagagtgggtaacccccagcggtccttgaacaagtctgcttttcattcactagagctctatttggtttataatcatcctcactacaaagactgcacacacggaagctctcagtgaagattagctgcttagcactcggcacagtaaccgatgctcaaccccagtgattccaaagatttcctgactggagtccccagggtttgtccgatagccaggtcttaccccatgggaattcttgttcactctagatcgggacctggaaaacccaggactcaaggttctaccaaagtagccttgccatgagggatgtttggagaatggtgtattaaactgaatactcccagtgacctgcagagaaaagtttgatcgtaccacattcattcagttaagggcagtgagactcagagacattgaatgatctaattaatttgtcacacagcccacaagtagcagagttgagtttcaaacctgggtcagcataattttcatagctcctgtagagagtaggtgaaagcaactgcctgtatgcctcaagattcggagatactagaaaaaagcaaggggaaatagagagtgaaaactattttttttaagtgatgtgatagcaagatgattcagagggtaaaggcatttgctgccaaacctggaatcctcatggtcggaggtacgaaccaactgtgagggctaaagttaagtttaaattaccaagcctaagaaatcttgggctggagagatggctcatcaattaagagcattgactgctcttcctgaaggtcctgagttcaaatcccagcagccacacgatacttcacaaaccatctgtaatgagatcagatgccctcttctggtgtgtctgaagtcagctacagtgtacttacatataataaaataaatacatctaaaaaagcaaaacagctgggtgtggtggcgcacgcctttaatcccagcacttgggaggcagaggcaggtagatttctgagttcgaggccagcttggtctacagagtgagttccaggacagccagggctacacagagaaaccctgtctcgaaaaaaaaacaaaaaacaaacaagcaaaacaagcaaacaaaaaacctagccagcacagacagagtcacttcaggagctgatgatttgctgtttgcttatcaaaactttcttcaaaatagtcattatccactcaaggtcacctagccagaaaggtacatgtgtcctacgttctcagggctagcgtggcttacggttgaacacagcaagattcgtcttgactaatttcacactttccctcaaggactcaagctctcagacccaacacagtcctctctctcatctctgcaactctctctgcttccaaaccagtgacacagtattcccattatccctggggacagatgtctcataacaaacatgttctaaaactcaagtacgaaactcaagaatgagcctcttgctgattgcagagatgctgctgtctgtttccaagcatcaacagtcgtgtctggggctttaaaaatcaggtgaggctgcatagcgcaagatgctaaactcttgggctgtcatgggcttgggctgtcatgggccagtgccaggaggtttatgtggccttggacaagctacctcttactgcccatctctagaaggctcaggaggtcagggcatactttctgctagggatggtgcaagagaaagttatggatgacattgggtaatagggaagcatggggtcttggatttaaatacaagtttgacttgcgattgctattcttagttgtcaacatgactacatatggaattaactaaaataaaaaatgagggcacaccaatgaggaatttttgcttactttgaagtaggaagatccacttcaaatccagatcttgaaggggacgataacgatacacatctttaacctgggccatactttctgttggaagtctgtatacggtcatggaagaaagctgcttttgctctttgcctgcttgctctcaccttgttagcaagtccatctcccccttggcatgagatcctgcttcttcaggattccagtgtacactgaagaccagccaaggcatccagccccatggactgggcaacttctagattcttggactttcaattcacagcccaccattgttggattagctggactggagcctgtaagtcattgcaataaatcccctttgtatatatagagagattcattctataagttttgttactttagagacccttgactaatacagtcttccatagagacaggatatgcctcatcctttgtatccggagagcaagagaaaggccattgatcacctaagtgggttgattccctggtggggaattggaaggcggatacttattggtgtttgaagaaaatataatctgggatcatcaataagacacaggtacagggaagggtaggatgggggtaggggcttgaggtggggacagaaggcgtgaggaagttgttgtgggtggtgggaaagcaagcacaaggcagccaacgactgagtgtggctttaacgtggtagattaaggagctgggactgaagctgagtgggcaaagttcttatctaacatgcacagtgtttgggttccttccctgatattgtaagaactgggcatggtggtgcacacccgtaatcatagcgcttgggagatggagacagaaggatcagaagttcaaggtcatcttcagctgcatactatgttcaatgctgggctgggatacatgagaccctgtctcaaaacaaacaaacaaacaaacaaacaaacaatagccccctaaagtagactctttggagagttatgagggtacagtttaaattctaagctggttaaggaggtgattcgaaattgtcaggaatgaagaaggagagggccagcagaggagctacaggccagaggtggggatatccagggtggagaagggagcctcaatggaggtgaggggtgttttcctagcacttcagaggtagagacaaagacatcaagaattcaaggttagccttagcttcagccagttcctagccaacctgggctacaagagagcttttctcaagaagtgtttagccctatcccatctctccttccatgtttcccccacatccacctgtgtctcccctttgaggtgaacagctttgctcccttccatggtagcttcctacctcagcacaagcccagaaatggactcagttgaccaccgatcaaaagttctcaggtcacgagccaaagtaaatattttgtcattttaagtaactcatctcccccagatatttgtcacagtgacagaagtaacatagacaccaaggtaggagaggggagaaatgaggcattcatggaaaaatgagaaggatccccaagtccaggtataggagcccatgaagtacgacagcccccctggtggctgcttcacttgaagactgccagggaacagggtcacaaggaaagaccttgtcagacaaagctgacaaaggtacgatggagaaggcctgccttctgctaacccatgagctacaaggagtgtactagttactttcctcattgttctaacagccaatgggaacggctaaggaaggaaggcttgtttgactctcagtttgagggtatgggttggtgggtagtcatggcaacaggagagtaatgttgctggtagcaatgggtccacagtcaggaagcagagaggacaactctggtgtttagcctactttcttctttttattcagttcagggcctagggcatagaatggggccattcacattcagggtaggtcttttgacttaatgtggggagaagatgaagtcaggtcagttgccaggctgtgactcatggcacctagagctttgatggcgattctaaattctatcaaaatgataatcaaaattaaccatcatatttggttcctaaaagttgaagtgtaagggtaaaaaaaaaaaaaacccttctgggcagagcaggtgaggtgtgtcctactaacgctgaagacccaagttctgttcccaagacccacatggggagaaacagcttcagccaattgttttctaacctccacatgtgcacctcggcgtgtttgcatcccaaaacacaccacatgtacactaaatacatacactaaatacatacatacatacatacatacatacatacatacataaatgtcataaaacaggaaaacagcctttgttcttttctgcaatttcaacacggttcaactatgggcaggaaacgtactacaccctcccattcccatgggacaattgtttacagattgctggcagatttgtgttctgtttgtcttttctgaatctctggagcctgttggcccctcatttggagccctctcaaatctccctgtgcctcctgattctctgttctaactgggtactgggatggtctttctcctgtcaccctggatccatccactctcctagaccaattccagagggaagtcctgtgttggaaccccaggtacaggctctcccaaacacgggcacgtgtcaggtgtctcctctcctggcttcccttcagcagacattccagacctcatcaccagaagtcggaagtcaaggagaaaatcaggaggcacccacagcagcccagctgtgaacaggtatttgtgagacttaaaacgaatggcaccttttgtcactcaaacacatggctgcgccttggatattcagtaagttccactgttctctacacgtcccaggccaaagtaggctgttggagccaattaccacttgcatcagggaaccttgcccgggattggacagtttttgctttagacagggaatgaaaataaggacaagatcgctccaaggtaagattgagaagaggtttattgtagccatgagggatagaactgccagccgcatctggaggagaattcgaagctgagagaagggaagaagaagcccagagagaggtttagggtagggggcggggtgagaagtgcggggaggagccacaggtgtggagtgagacttgtcctaggtttctttgggccatgacagatggttagctcctggtgctgggacagatatctgagaggagtgacataaaggcacattcactctgactcatggtttcacaggcagtcgggccagctggatccctgtgtctaggcctctgaagtaacatgccatggtggaaaggcag

SEQ ID NO: 242 - DNA, 863 bp, Mus musculus
gggttcggggtttattgattgaattccgctggcgcaggatcctctgcagaaagagagagcgcgagagatggagatggacaaacggatttatttagagctgcggaacaggacgccctctgatgtgaaagagctggtcctggataactgtaagtcaattgaaggcaaaatcgaaggcctcacggatgagtttgaagaactggaattcctaagtacaatcaacgtaggcctcacctccatttccaacttaccaaagttaaacaaactcaagaagcttgaattaagcgaaaacagaatctcaggggacctggaagtattggcagagaaatgtccgaaccttaagcatctaaatttaagtggcaacaaaataaaagatctcagcacaatagagccgctgaagaagttagagaatctcaagagcctagacctgtttaactgtgaggtgaccaacctgaatgcctaccgagaaaacgtgttcaagctcctgccccaggtcatgtacctcgatggctatgacagagacaacaaggaggcccctgactctgatgttgagggctacgtggaggatgacgacgaggaagatgaggatgaggaggagtatgatgaatacgcccagctagtggaagatgaagaggaagaggatgaggaggaagaaggggaggaagaggatgtgagtggagaggaggaggaggatgaggaaggttacaatgacggggaagtggatgacgaggaagacgaagaagaagctggtgaagaagaagggagtcagaagcgaaaacgagaaccggacgatgagggcgaagaggatgactaaggaagaacctgtttggggaaattcctattgtgatttgactgtttttacccca

SEQ ID NO: 243 - DNA, 744 bp, Mus musculus
atggagatggacaaacggatttatttagagctgcggaacaggacgccctctgatgtgaaagagctggtcctggataactgtaagtcaattgaaggcaaaatcgaaggcctcacggatgagtttgaagaactggaattcctaagtacaatcaacgtaggcctcacctccatttccaacttaccaaagttaaacaaactcaagaagcttgaattaagcgaaaacagaatctcaggggacctggaagtattggcagagaaatgtccgaaccttaagcatctaaatttaagtggcaacaaaataaaagatctcagcacaatagagccgctgaagaagttagagaatctcaagagcctagacctgtttaactgtgaggtgaccaacctgaatgcctaccgagaaaacgtgttcaagctcctgccccaggtcatgtacctcgatggctatgacagagacaacaaggaggcccctgactctgatgttgagggctacgtggaggatgacgacgaggaagatgaggatgaggaggagtatgatgaatacgcccagctagtggaagatgaagaggaagaggatgaggaggaagaaggggaggaagaggatgtgagtggagaggaggaggaggatgaggaaggttacaatgacggggaagtggatgacgaggaagacgaagaagaagctggtgaagaagaagggagtcagaagcgaaaacgagaaccggacgatgagggcgaagaggatgactaa

SEQ ID NO: 244 - DNA, 744 bp, Homo sapiens; identical to SEQ ID NO: 243

SEQ ID NO: 245 - DNA, 925 bp, Homo sapiens
  misc_feature (910)..(910): "n" at position 910 can be any base.
gattccgggtgcgccgcgggtgctgggggctcgagaacgagcggagctggttgagccttcaaagtcctaaaacgcgcggccgtgggttcggggtttattgattgaattccgccggcgcgggagcctctgcagagagagagcgcgagagatggagatgggcagacggattcatttagagctgcggaacaggacgccctctgatgtgaaagaacttgtcctggacaacagtcggtcgaatgaaggcaaactcgaaggcctcacagatgaatttgaagaactggaattcttaagtacaatcaacgtaggcctcacctcaatcgcaaacttaccaaagttaaacaaacttaagaagcttgaactaagcgataacagagtctcagggggcctggaagtattggcagaaaagtgtccgaacctcacgcatctaaatttaagtggcaacaaaattaaagacctcagcacaatagagccactgaaaaagttagaaaacctcaagagcttagaccttttcaattgcgaggtaaccaacctgaacgactaccgagaaaatgtgttcaagctcctcccgcaactcacatatctcgacggctatgaccgggacgacaaggaggcccctgactcggatgctgagggctacgtggagggcctggatgatgaggaggaggatgaggatgaggaggagtatgatgaagatgctcaggtagtggaagacgaggaggacgaggatgaggaggaggaaggtgaagaggaggacgtgagtggagaggaggaggaggatgaagaaggttataacgatggagaggtagatgacgaggaagatgaagaagagcttggtgaagaagaaaggggtcagaagcgaaaacgagaacctgaagatgagggagaagatgatgactaagtggaataaccnattttgaaaaattcc

SEQ ID NO: 246 - DNA, 746 bp, Homo sapiens
atggagatgggcagacggattcatttagagctgcggaacaggacgccctctgatgtgaaagaacttgtcctggacaacagtcggtcgaatgaaggcaaactcgaaggcctcacagatgaatttgaagaactggaattcttaagtacaatcaacgtaggcctcacctcaatcgcaaacttaccaaagttaaacaaacttaagaagcttgaactaagcgataacagagtctcagggggcctggaagtattggcagaaaagtgtccgaacctcacgcatctaaatttaagtggcaacaaaattaaagacctcagcacaatagagccactgaaaaagttagaaaacctcaagagcttagaccttttcaattgcgaggtaaccaacctgaacgactaccgagaaaatgtgttcaagctcctcccgcaactcacatatctcgacggctatgaccgggacgacaaggaggcccctgactcggatgctgagggctacgtggagggcctggatgatgaggaggaggatgaggatgaggaggagtatgatgaagatgctcaggtagtggaagacgaggaggacgaggatgaggaggaggaaggtgaagaggaggacgtgagtggagaggaggaggaggatgaagaaggttataacgatggagaggtagatgacgaggaagatgaagaagagcttggtgaagaagaaaggggtcagaagcgaaaacgagaacctgaagatgagggagaagatgatga

SEQ ID NO: 247 - DNA, 96599 bp, Mus musculus
  misc_feature (4408)..(4427): "n" at positions 4408 through 4427 can be any base.
  misc_feature (39512)..(39633): "n" at positions 39512 through 39633 can be any base.
  misc_feature (53333)..(53661): "n" at positions 53333 through 53661 can be any base.
  misc_feature (61962)..(62538): "n" at positions 61962 through 62538 can be any base.
  misc_feature (64905)..(64941): "n" at positions 64905 through 64941 can be any base.
  misc_feature (83686)..(83705): "n" at positions 83686 through 83705 can be any base.
taattaagtagataaaaaatctcacctgggaccattcttttagtagcattaaaaaaaagatctattttgttggagagtatttaaaacaagacccacgtgaagtatgagaagcagtagcagacgcagcatcctttattaggtcctcgtggctgggtaaggaataccagtgcacaccagctcagggctgacataggattgctcatagctattttagttgtattcatgtcatcttaaatacagtttattaacattgtactattccattacaccattaatttatcttcagagatatttatagtatcaatttaaaagctgtaaaacttcatggaaagtagcttatactatagggcttcaacaaacaagcttgccattttgaacagggactcacaggaactggacttcttacaaggtttggagtttcttgctgttgttctggttgatagaattatgaaccttataaactcagtactttttagttaacctaaatacataaatctatttggattcatcttatgaaaagagatatgtcattagatatatgatcattatatgcttcagtgattcatgggccttgttacatacatgctttgtaatgtatgaattatttagtaagaaaaatcacaataattttgttgttactcaaaaatttatgggttggcagaaacaattatgcagcccggaagctggcgtgttaaggtaacatcattaactcatgtggtatgagtttttagcagccgtttgacataacctttactgctgctgctagaacagatcagtaattttgtataacaatctgcctgtgaacagaatgctgaattggctatccacaaagtgattcattttactttatttccatattagtacataatttaaatcctacctaaaaagtgtctacccaaaccctaaagaataaaaacatgcaaaataatgaatgcttcccaagtacacaaaagtgcaaaatcacatttaataagagcaaccatttctatttttaaaatgttagatgcttaagaattggatgaaaataatttatgagagtagattatccttaaagccttttttacacattgtattacagccactactaagagataaagaacaaaattttattttggaaggcagcaatgccacaaatgcaataccaaaggtcatgattttgaactttgaaatttacaaaatgaagtagccaagaatttggaagtctgaatataaacttaggctagctcaactttagactatttgccttgaatgtgtaaggttccacattcaatcttagcaacaaccacagtacacacactaattagtatcactaattaaaacatttatttttattttctatgtagtgttttgcatatatatgtctttgtatcacatgtatacctggtgcccacagaaaccaaaaaaggatatcaaatcccctagaacttgagttacagacaaccttgagccactatgtaggtgccagaaatttaaccaacatctgaaagaacagcctgtgctctttaatcgctgagccatctctctagtcccagaatgtcactaactttaaataatatttaaaattcgacaatcattcatgcaccaaattaatactcaataccagcaaagctgaagaccaattttagtacatttgatttgccaacagactctagtagtcctgagtctacacagagaagtcagactgcagaagactctctgcacacgacagactgagagtcacgtgttggcagtttttgttggcaacatttatcatagaatggatgctgtaaattgaatgaatacatgattgtaaattgcaaaggcagcatgtttgcctttaatagcatcaagacaaggactctttaatggaaggcatttggatctgtcttgcaagaagagcaataaagaggactagagagatggctcagtagttgtgagtactgacttctcttccagaggtcctgagttcaattcccagaaaccacatattggctcacaaccatctgtaaccatattaaagtatacttaatacattaaataaagaagagcaataaagtttgacatgtctcaagtgtaatgaatcaagtatgctttctgaaaaaaaaataagagtttggaatccttttgccatatcctcttaaggcatttcaaaagttgtattttattttctcacacatgggaactgctattgtaaagtcaaatttaggtaatgcacagaagtggaacagaagtactcgaatcagctagactcattctttttattttacatttgtattatcatcatcaccaccaccaccatcactaacaccaccatcatcattgaagcatgggatgcaggcattgagcaagaatgataccactgagctatatcccattcagccttactcttttaaaacaaaactaatattttgattgcgttgtcaaatgagcaatcatctctcagaaggaagccaggcttctgttggttttcagaggctacatgacaatttcttatgaaggcagggaagaactcttgagtaggacagcagattatgatggtgattgggaagtctccatgcctctgtctgattccccgtgactatattcagtttggtgatttatatacatataatataaaaatcctattttagtggacatggcttaaattatttcccagccattaccagttggataacagagtagtttcagctttctgagctttagtatctttgctatacaataaggagactatctaacagaaagcatttaatcattacaaggaccttatacattctaagtcacttaatcaaaccactctatgatgtaagcattgtgcactgtatttcttcttgttatttagttagcatcagctcatctttcacctgtggaagttttacccaaggccagacaaggttcctgagtctacattcttggtcacgtcattccacttgtcctatgatacacaagataattctgtcaggtgataactgagaagtcacataaatgagacttcattacttcctctgcatataggggaaattcagaagtgcttagcagtgagtcagagtcatgctagagtttgttttccagagactctagcctattctacttaaggggaaatacactttggagaaattaaatctggtgcattttgaatgaaagaagccttcgtcttagattatctgaactctccagttctgatcccgtgcctggtgcatgctgctgccccatgagcacctgtcatcgccgacccccctcgccggtatgattgttaccactgcttattttcattcctatcaaaatagataagaacacacttgcctatcatagttttggagactgctcatttttttcatatcttcatattcttcttaaataaacaaacaaacagcaatcagtataaagaaaatgcttgcttgcggtagggagatggctcaatggttaagtgcttacagtacaagcttaaagaccagagttctgattccagtactcacctaaatgctgggtgggagtggcagcccatctgtaattctagtctcagaggcagagataagggattcccaaagcaagctgattagcaagactaaccttatcagccagctttgggttccattgagagactcatcgatgactaaggcagaaacatagagggtgattccatagcaacctcaagtcttctcgggccttcagatatcccacagcctcctaaaagcaagacctacagaatgggaaggacccatgtagataacgtagacatcaagggtaagaggattccaagcagagaggcagtagagagaaccctggagtgtgatgtctggcatgttcaagaagcatgtgggacaatgacttgtgtgtgtgtgagaaggaagaggagacatggggttcaagagttcagaagtgtgtaggctctgggagatggcccagtctcactaagttctgatcccagtactcattaaaagccttgtgcctggaattcaagctctgggaaggtgtagagagaaggaaccctggggctccctgtccaggaagcctagctgaacaggtgagttccaggtttgatgagagacccagtctcaaaaaataaggtgtcaagaaatttaggaagacacttgatgctaaattctggctttcacatgtgtgtctgtgtgtgtgcttaagtatacacgtgtgtgtgcacacaaacacaaatacatccataggccctcagaagaggatgcagaggataataaagctcagtggtaggctccatgctcagtatgcaggatgcctgcaaactatgccaagaaccaaataaatggatgaatagttcagcaggagtaggggtcaaaggagaaagagtgggggttttgcctgctcgaggtgagaagctatcagtaaagctggacagaaaataacaagttactattgttcagtgaaaagaaagtattttcaggagtggtaaggatgaaannnnnnnnnnnnnnnnnnnncacaccttaaatcccagcactcccgaggaagaggcagacggatctctgtgagattgaggccagcctggtctacagagcaaattccaggacagtcagggctatatagagataccctgtctaaaagaatgagatgggggcggggggaggaaaagggagagggagggggagaggtagagggagagggagagggagcagggagagggagagaaaattatgggcatggattctggttaaggatttgagattgaggttaagataataagagagaaaagaaaatctctctgaacttataaaagcaaaataaaattcctcattaaatgactttaaagcaagagtcaaaactataaaaaccttagcaccaaacttgggtagaatctctctcttcacacaagtgcgtgagggtgcgcacacacacacacacacacacacacacacacacacacacacacatgcacacaaaaccacaggagattgtcttagccacaggcagctacaagataaaagtacagaaagggaaaaaactttagtgacatggagaacttggaggccttaagcaaagtgggtatgtttctgccgtgctgtggctatggtttgtatctccgtcactgcaaaggttgggaattaaaggcttagtcttcaggtagccatacctcatgagagctggtggactctttaaatggtgagcacttacagaagctctgagagtcattaggcccgtgcttctagaaagaattgttgaacatggcctctttggtctctggctttgagttactgtctcttcttggtacacaagtacaatcccttcattgtgtcagaacccagctgatgtcagcaccatgtccttgaacctccagtgctatgtgctaaataactatcatctttataaagttagcctggtcctactgctgaaaggggacaagcatatgaacttccatctctaactaagaattcctctccaatagacacccacttgcaaaggaaaaattagttttccaatggagtctcagtgactttataaatcacacttaaaagcaggctccattcccagaagtagacacccaacacaaaattaactcaatgttatttttatagacttttaatctcatatttctttgtttgggcttatgttttcttttgtttttcaaggtagcatttctctgtataacagtcctgactgtcctggaacttggagatctacctgcctcagcctccaggtactgggattaaaagcatgtgctaacttctttgggcattatcatctttctggtcttatttatgtgttatggtttctgattttgtgtttttatgggtttagctcttgtgtgcctctgcatttcttgtgtttactgttattttatttttgttttttttaaatctggcttgtttgcattttttgtttgcctgcttgttttctaaaaagagagaaaaagaaggagtacaatgagtggtggggataatctggggggagttgggagcagagaaaccatgatcacaatatataataaaaaagagtaataaaaatacataaagttagcatgtcttaggaatttcattacagtaacaaaaaagtctaatgaaatatctgaaagagttaaaattagtctggaacattagtgttgttgatgatgatagttgtggtggtggtggcaattattacttattattgaagatggtaggaatttgggttcaggaatcaccacacaatccatacaaacacagatcttagttaagcaaaaatagtttattgaatgcacaccctaatactggtcagaccagggacatagttcagaattatctgaactatgagaacagataactttttttttgtcagcttataaaggaaaaaacccacaaaagttcatatgcaggtgcaggcgtgactcaggatatcttagactgaacagttcatattgacccttgatttgatgggttctacgtaaagctttatggaatttcttaagatatcaaacctcatacagaagattcagagcatacagaacaaaacagggtatgtggtcagcatgtccttgagccaagtcacttttctgtgtcaatgactggcaggcatgttaaagcagcaatacaaaatagctggaggacatggatcagaatggccacagacagctattcgggatggggtggggtggggtggtcagaccatatcagtaggggtcaaatccagggcctaacgtgtgataagcatactgtgttccactgaggtacccagtcctggaatagaagttcttacatgcacagtcatagcagcagcattattcacaacagtcaaaagatggaagtaatctgagattccattggcaaatgaatgaatgaagattacatatccaaaggacttatctttaacccagcaaatgaaggatctttagtacaaaattaccacagagatgaactttgaaggcattactctaagtgaaataaactaggcacaaaagataaatattgtctaactccaattttataaggttttaaaagtatttcaagttcaaaatcagaaaactaatgctagtgagaggaagggggagggaagtcattatttaatggggaggggatttcacttttgtaagtgaaaagttctagaaattgattgtgtgacaatacaaacgaacttaaacagtgccgaagtatatacctaaaaagggaaaatctgatcttatgtgtgttttatcacaattaacgtacattaaaaaccagtcgatatctgtctcagggtttctatgctatgaagagacagcacgaccataacaactcttatttaaaaaaatatttaattgggctggcttacaggttcagaggactagtccattgtcatcatagggacaagcatgaaggcatgcagccgacactgtgttggagaggagctgagagttctgcatccagatgtgcaggcagcagaaagggagagcaacattgggcctggcttggacttctgaaaccctaaagctcacccccattaacacacttcctccaacaaggccacacctcccaagagtgtcactccctatgagtttatgggggccattttcattcaaactgcataacacctaattttcagaaacaccttcttttcagttaaggttacacacaagtaaggatttaccagggcagtcagcagcatctccttcagtgtttccttcccatattccctctgggcccatttctccttgcttttaccaccatctgatatattttattcatttttgtgtttcttccatcagaatttagagagaaactttctatcatagtcatttagaagcaggtcctctgtgctaatcattgtctcattctccttttattattttgttttttgggtttttgttttgttttgttttgtttttttgagacaggatttttgtgtgtagccctggctgtcctggaactctctctatagactatagaccaggctaacctcgaactcacagagatttgcctgagtctgcctcatggtgctgggattaaaggcatttgccaccacaactggttcatgtgtcagttttcaatgataagcaacttataagtaggggggaggaggtatatattttgcctcataagttcacagattttaggccatgatctctaggcctgtggttaggcagacttccacacatcagcgagtgtgtgggaaaaggcaggaagtaaaggtgttttcttcatggctgacaagaaacagaagaaggaagaagggcactggtcccaataacgtcgtataatatgcccccaagaacctatcttactctcactgacccaacattagattctatcgtctcctggcagtgccactgacggacaagcaaggcttgagcatatgggggacatttccaatccaaactttaaccccctttaagtaggaaagaaacaagcataaaccttctactacaattaaagtactttatggctaccaaactacctcagtcagaacttgtgtggctacttatgtctactgttaaaaagaaaatactatgtgcaaaaactttaagatcataaacatatatccctttaatttggacggtggtgtttatattacttaacaaagaggtacttttgaatgttaatagttctgtgaaactctgctcaaataataaagtcttaagatttcatgctatgtaaaggctacaaaaagttgaaatgtgattatatttgctctttagatatttgggaagctgagagactgccattcatatatttaaaaaagtgcttcagaatatacatgcaaatttggcaaatggtgttggttttccctatggtactatgaatttttaaaaagacgttttaacaaatcataggttaatagaaaatctctagttttgtagttaattttccttaataatagaaataaagtttagattaagaagtacatggcaaaatagtgaatttttctttagcactgaagagcagttacaaaggggtagttccaacagtacctggagaatcggtctacgtgaattcctacctaagctattaaggaataataactaaaagatggtcatttatctcctacaatggcctttcaaatgcaacaggaaaaaagcccaagtagaggaaattatgccacaaattttggtattacattgaaaatgatcaacatttaattgttcctcctcttacattaatcacatatctgtttattccggggaaagtggacactggtcccaccaccccacgcactatgtttatgcataatcagccccaaaaggtagagataatagcataatttaattacaaataaagggcctacctacacgttgccatttgtaagcaattcttttgtatagacacatagatcaacaggattatgcactttaaaatgtgaggtaacaaggcatttaaaaataaccaaggtttacggctactgccctgctatcactgactgcataaacactgcaatttagctgaaaatatatggaacagacgggatatttttgcaacggttgaataagatattatgatgccagaaatacagctgtccccaggcagttaagcgctctccattgagtttctttactgttgcttttgagtaggagattgcttggtactgtaggtcactggttagggtaaaggacctcactgaaaaattcatgcacactttgctaacgtgggagaaaaaatagtggtattttggaactgttaattggaagaaggggcataaaaacatgcttttttttttttttttctttttttaataaaaaggtcttgcctggctcttgccgatttaatgtaacaaacccgcggatagtaaaaggtatataacttgacaagctggtgctgccgtcttgtccttcaccgccttttctgcatgatcaaaccttaaattgttttacggacagcccccagccgtagatccgtgtcttcctgggttttctaggctcctttaccactacctgaagagatggaagtcagccagtcctagcacgagatccctgctccgccccagctgccctcttccaacatggcgccccaggaggcgggtcccacatgtcggctccccgggttccggcgccatcgcgttttggttccggagtaacagcggtctaacggccgccttcctcctcctctcgccgccacctccgctgccgggacgcgggcctcagtcggacgatcctgcacgcgccgcgccctccggttccggctgcggtccgggacccgccccttgaccccgcggccctgggcccccctgcctggttggagggcaggcgccaccggtgcacctccgaaacagccccgacccagcccgcggcgcccggccaccgtccccttgcccaccgagacactcaggacggcaggaccctggccactgtacctgccttaaaccaggccgttgctccgctgtctcctcttactcacaaggactacagaatgcttgtgggttctgttttgtccacttttgtaactccaggaccttccgctctctactaattcctcttggccggtcccccaacagtgcatcctctcctagggacactccacacgacctgggcctggttttgggcctgcaagctccctcctgatcgctcctcttcacttctccccatcttcttgctccctatttatcgcctgccttctgtctatcgttccccttgtcacttcttggggctcctcctaagtaggggcaggtcggtacccctcgccccaggatgtgagaccctttaacctgtaatgctgtggctggcccttggccccttctgtgccatggagaaccaggtgctggtgattcggatcaagattccaaatagtggcgcggtggactggaccgtgcactccgggccgcagttactcttcagggatgttctggtgagtggtgactttagtggccaaatcccagcgttggggattatggatctggataggcagcatcttgaccattggtggcctgagctggcctctggtggggtcaacttacctgttttaaccacagtctcggttaattgcactcactgaaaactggtaaatgtgcagcgccctgggaaattgatgtatccgactgaacccctgccctcaggaagctcacagtctggactgtgacttacacaccagtgcagacaactgggatgtaaagagttttaaaactgtttcttatatttttctcaagtatttggaaaggattcctgccctcattctagccctgtcactgctgagtttcctgaacttgtgacctgctgggaaagggacaccagggcaatcttagtttacaatggttaagcaaaccttagatgccactgaatgggagacctagacttaactatcaatatggaaaggatgctgcctgttagaactacagcacatcattccgtgacaaacacagctcaatttcagagatgttgagtgttcagggaaaatttacatcttagaatcaacagtgcattgccttgggatgcttagaatatatttcacacaaaattatgaaggttaatgtaggctggcccttgagtccatatataatatatactataaaacattatgtatgtgtgtgtttgtcctgaatagagagtaaaaggaccttccgaggacttgctcctgaggttgagagtcagtgccaaaactatagcttccttacttagtatatgagtatatgtgtgtgcagatgtgtgtgcgtgcatgtggagatcagagatcagcctcaggtgtgctcaggtgccatccaccttgttgttttgggatagggttggctggccagcaagccctgggcattcgcctgtttcagcattcccaatgttaagattacaagcactcatgccaccaagcctgggccacctgtcaagcacccacttcctaggttttttgtttatttgtttgtttttgtttattttttatttttattttttaacatgggtctagagattagtctcaggccctcatgtttgcataggaaacactttgccagctgagccatctccctggcccccaaatttacttttgtttcctgtagtgtccccatatacttcagtccacgtgcatctttctagtcagttgacattaacagggtgacatatatgtatgtccacagtaactcagcaggagaatttggtgtacggggaagaatgttttaacaggcagatgtgccgtctgacttacagggactataagagaacactgagtggtgtcatttactgccttgggttgataaaaaatgaaatggtggtatctataatttcattttgaaagctagatgctcgtaccaccaaggccatgcttgggtctaagccaagcatgtggcaccttaggtgagctagcagcctccagtctttgaccccgaatggcatcccttctctgcagctggtgctcttcacaatatgcacagtgctagtctcctttcctcataaggccccacagtcctccttgctgtcctcaggctcatcttgattatcctggcacctatgtcctctcttgccacatcttcttgagcatcctgtgtcccaggtgtacagagctactgtcagtactcccaggtacccaggctgtgcctccactttgccttctttgtctggctctcacccacccttccctgccatgcctcactctccctgtgtcagtgtttgccaggtggctgccatggtagtcctatgtccatccctgtggcaaagcatgcattcaggatgatgtgcttgtctattctagaatgtaaacatctggaggagagaaagagctctgtttctgttgcgtcatagcatctgagacttgaggaggggccaatgggtgcttgctgtgtgagcctgaacttgggtacagtccgtggaacctatggtagaaccaactcctgaatgctgtcttctgatttccacacacatggccatggcatgtatgcatccgtgtttactgtttatacacctgcatatataataagtgaaaaaaaaagaaaagaatgtatatcttaaggaccagctgtgtgcaattttaagctgtgcagatcactggcttcttttttggagccatgttggtgtctgccatgttgctcagtctgctctcaagttagctattttaagagggaaccctgggactgctctcctcctgcctttgcttcctaaagctgggtgagcaccgagttctcagtccggcagttggaacttcacggccaggtgtgccactacctcggccagttactgtatgcctgagcctcagtttccttatttctagtcagggacacctgcaccacgtcgtgtgaagattaaacacatagaaagtgctctataagtgttgacatataatgtaagggacaggacctggccttctgcttcctgagtacccacaggagatgtccagcgtggggcctccaggaagcatcgcactatcatcactaaggctcagaaccgcgtgtcgggacagtttgctcataagatccgctggagcacatttgtcatgaagagccggaaaagaatttagaacttggttctgtctggttgctgtttcctggcaagtctgacagggggccacccaaggtccttgtgatctgttctccgatttcacgtcatctcttccatcaagagtaaacaaaaccctaaagaaaccagcatctctgacttggaaccttgagctttaagtctgtggaacttggatgcgtcccttgtctgacccaagccccctctcacactttcctgttttcagatgaggaagcgtaagtagctctggaaggggaggggcctcctagagccttggagctagttggcttacctaacacaaaagccagagggggtttcagccactgagtccagagggattgagtatctgagagcagagtcagagttgaagatccagttgctccttctccacatggctgggagaccttgtgtaggctacttagcttgtcccctctgggcttgcctgtgctctgtatctccaggacctaaatgcagtatgaaggaagccaaaaccaagtgcagagacactgactgggctctctgtattccttcagcctcctttctcttcatccttggagacggtctaggacagttctaggacttgtgaatagaattggattgattagtgtgaggtagaggactaattagtgacatttctatccaagtggaaccagtgactctttcttctgagcgttccttgttgtgacaagattcctaacaaaagccacttagggaagaaaggtttgattttcactcacagtttgaaggttgagcaggaggcagctggtcacattgtctctgcagtcaggacgcatagactacgaaggctgctcagctcctgtccatgaaatggtgctacccatatttaaggtgtgccttctgcctcagttaacatggtgtagaagctcccatacagacatgcccagaggtttgtgccataagtgattgtcagtcctatccagttgacagtaaccgttagcaatcacagtgaacactgcttgccactgagatcttgtatttggctctttttgttactggagtgtttccaggtgccatcttatctcagagaccagattacaggccggctgaagtctagagccaagtcctgacctgtgcagacttataagctcctggcctgctacagaggaggtttgacttctccactgttatgtagttttctgtcttactgagaagaagaaaggaaacaaatacaaaattagctcttaaaggaaactggaattttaccatttatcattaaatataccctgctttaaaatggccagtagagcggctgaggaggcaggcagtccttgtcctctggccaggttcagactttcctctggattgcctgtgtacttaattctgtattcagtttatacatctagctccctgttaagaaacgcgtgctacctgagttaaaggccagcctgatctacagagtgagttccaggacagccaggcctacgcagagaaaccctgtctcgaaaaaccaaaaaaaaaaaaaaaaaaaaaaagaaatgtgtggtacctgtgaatgtgtagaaagacatttctaactctaaatttttgtttcttagcttcctcacaaagtaggtatgtcatctgctaagactagaatcagagaaaacgttttttctggctgatgtgtaagggttgttgttctcccccatcaaatttcttttgcacggatttattttttaaaagaaagaaaaaaaaaagacgctccatatgacgattatgcagattggcaccgcagtaaacactcctaagaactgcctttagaaggaggttgtagcctccactctgtaagtgctctgctttggaagggctgcaggctccctgctgaggctctgtcagctggctgcctggtgccagttcccgcacagcctggtctgcgccatcgctcctggagaggaaagaggtctgcaagtcttttactgtgggactgggcatgatggaggactcttctcccagaacttaggtgttctgggcctcttcccatcagctgttctgaagactaattttttttttttttagtattttcaacattagagactcatttacatattgatattatatacaccttccagggccccctccccccaaatcaacttatatcccagcactattaaatacgtttccattgcttaggaggaaaggttgataagaactgtcttatcgtccttagctgcttatcatcgttgtagcttgtttgctaaagccactgctatgagagcaaggtaccacacttactgagtgtctacaacgggctgtgccaggtcttaggcttttgtttatcacaccatttgacttccacattatcctttcagtgtcactgcatccatgttttgaaaataatcagaatgaggctcagggtggtcaagtaaatatttttcccaggttgtacatctaatagtaaagatccaaagctaagtccctcccccacacatgccacctcccagcctccggtacatgaaactctgtgtgtgtgtgtgtgtgtgtgtgtgtgcgcgcgcgcgcgcgattgtatagtgatgtgcactgttgagttgagaataaaagactgtcttcaatacagtatgaagtttttctaatcccctttctccttggaatagagatttaaactttctgggctaagtgtgattgcaagctcatgtttctgtggtttatgccagcatttcagaaatccttccaagttccgctgtttcctgttggacgtgccacatgttggcaataaagaagatggctaattgtgcttctttattctttctttgtttaggatgtgataggccaggttctgcctgaagcgacgacgacagcgtttgaatgtgagtccggctcgcgtactctccggttctttctctctgcagtgatatttcacatgctttatgggttgtattactttcagaactgacaaaaccaggttatttatgatcatcatacggcacatttaaatatttataaattaatgcaagtttaatgatgatactgaaccgagtaatattttcttatttaatcatatcttgggtgtgcatatctctacaatatagctttaattaccaacatgacctttatctgctcttctcattgttataacagtgcagggcaaaatgagccgtgtaaactacctgtagaccgatgatcgttgattaagaggttttaatcctttagtgctttaggacatcgcagtagaataaagctctcttgagcagcgggtggagtgagtctgtttcagtggggtttggctgcccccatgctagatgacaagggcacttctatcctgactccttccgctctccattgaactggcctagaacagggctaggacgagctagtgttttgacgcagtccaggtcattgcaggaggagtcttggtgctggtttagaagtagcagaaggcctcaggtattgagaaggtaaagtcaacgtctggaattgtggtcttgcccgttttgaaaatgggaccatgggccaaggtgattgcttagtggagaaaatgcttgttatgccattgtgagaacctgagtttcagttcccagagcccatgtagaagctgagcataggagcacacatttgtcacccagtgctcctgtagcaagatatgagatggagacaggagagtccttgtgggatcaggtagccctaatgtagacagcaaacaactaaaagaccctgtctcaaacaagacagaaggtgatgactaatagctgagatagctgaggctggggtcagacctccacacacatgttgagggatgcacacccacactcacccataggaacatgcctgtgcacgctcacacacatacatacacatcatgcacatgcacatgcacacatggacatgtgtgccactgtccaacatggaaataatagtgatttttttccccaggtgacagtgcttttgttcttatcttaaagatgattactggtaaagtgtacgataataatggcagtacagtgccatgtccttgtcacttagtgacaggtaagctgtgcacaatggcagtacagtgccttgtccttgtcacttagtgacaggtaagctgtgtggcacttttgattctgcagatctctcaaggaagctgtccagcagaaacactgaacacccttgatgaagtgtaattcacttgttgaagtgttgcatggtaggattatttttaggtagtaagaaactaaatgtaagcaaaatgcctctgtacgtggactgataaatagtaatgtgtccctgttttgaaggatatagcagcacctaaaatgaacaagtttggagtctatgtattgatatggaaagggaccagcattgatttttgaatggacagtgtatatgggataatcccatctcatcgagtctagccctccttatctacctcatatgtttatagggggacaggatctacagagggcccattgcagtgctttctgccctgggaagtacacatgggccctgggggactggatttgaataggtacacttttcattttatgtatgtgtccattgctggaatagtgttcagtattctgaacttgcttttaaaagctacagtgagtaggactattaattactatttcattaatggcactagaatctccatgctgttgaggaatatatatgtgtgtgtgtgcatgtgagtgcatgctataagctctatttagatttctttcagtagctacagggagttggggtttctggaatagtctgagagtgagtgtttggtattcatactgctgccgggtgagttagtccattttctttagcctttacaagattcccatgaggtgctttgaaggactgctgttgttgcttcagcctaaggaagggcatctctcagaactgagcaacttgctcagatgcatgtaagtgagacctctggagtagattccagaaagtgttttctcaaccactgtgccgggctgttctcagagtcacccagttgaagtgcgtcctggctggctttccttaagcatggcaaggagaagtttacttttccactattttaatctctctctctctctctctgtctctctctctctgtctctctctgtctctgtctctctctgtctctctctctctctgtgggtgcatgtatatgtgcatgtgtgcatgtacttatgtgctcccatcccccactcgggcatgtgtggacagcatttccgtgtcagttctctccttccacactgggtcccagggatccagcgcaggccatcaggcttgcccccacaggcctggcttcgtactgtctaccccgctccaccagcttcccagtccagcgttcataatagtagtactcattgtcctgtcaccgatggtgtgctctgagccagccagtgtgctagatcttttccgttgattcttgctggagcttaataatttttgtagtgactctgcaaagtaggaaaattagacctttgaggaaactggaactcgaagacctgaaatgattgctcacggtgattgctaggaagtggcagagcccagaatcaaaaacaacacacacagtctttgtaagaacatggaagcctctgaaggataaacagaaaaaaatgttcagacttcgaggtttcattctttgatgccgtgttcttgtgtgttctccagcaaggatagcaatgctgtgcctggctgtgtgcagactggctttgctcacctgttatgtcaggcttctctccctttctctcttcctccctctttctgcccttcctcctttccctcccccatctttctgccaagtgctacctaggactgtaggtatttgccctgacatccaactatggaccagctctaggtaaaatagcaagagcaacaacaacaaaatatacacagagagacaaaaataatgacagccattggttgtttgtggctggcttatcctaaccctcggctagcttttctcatgactatttttgagtagtttgattgtctgacccaaaaatctgaaccactaagtggaaccaatatgcaagaaatagtgaagatttggtttgtaggccaatttgctgggaagtctgaagcattttggtggtttgtggatgagtaaccctcaaataaataaaactttatgaaaggaccatttaacactgcagcatgtatccaaccctgactccttacattggagagatggtgtgataattatagagcagcaagaggcagtgcagagctcaaagctgcagcttttcatagatgtaggaagagttagggattgggagctgggagaggttgctgactgactgacaggttgcctgggccagctcttacagggcttgtttctcagcactgttctcagaggggtggactagaagcctccagttacctttgcctcccttactgggccagtcatgtcctttgttcctctgttagcactagttctggagcaaaaccactgtcccttgtggctatattcaaataagaattgtgaaaggtcatgaattagagctaagtggatgttgttctgagctttaggattatctgtgctattgcctggaccttggatgtatttggttatgatggagatgttgggccccaattcaagttgccacacatatgagagggaagagtttacagttgctatttctctctggttttgccttctggcctggagtttccaagggagttagggctgcatgggataggagggagggccctctgggccacagtcagcataggggctggtggtcctaagcccctttctttctcattacccttgcaggttcttctcccacataactagagcacaaatgagtagtatttagttaattttaagtttctcattgtgtgtgtgtgtgtgtgtgtgtgtgtgtgtgtgcatgtgtgcacacgtgtgtgtggaggtcagaggataacttgcaggagtcagttctctccttctatagtctgggttccagggatcaaattcaggtcctcaggcttgatggcaagtgctgccacccactgagccacccagccagcttgctaacccagaagtacttactagcacctactggggtgttgtttgtttgtttggctggtttttaagtagcttaggaacaaagtaaaaagttcccatttgctggtttactgttattaatttcctgagttccttacacactgctgccgctgcctgccccaccctcattggcatacattagacttcttgcaggcattagtgtgctcatgtcaacttcggccttcagctgttgcttaaattatttaatatactagatgggcatgtaaatttttaccagcttttttatctatatattttatgtatttgagtattttgtctacatatccatctgcacgccagatgatggcatcaagttccattataggcagttacaagtcaccatagagtgctgcaaattgaacttaggacccatgggagaccagccagtgctcttaactgctgagacatctctccagccaccagcatttttttttttaagatagggtttttctgtcctagaacttactttgtagaccaggctagccttgaacccacaaagatctgcctacctttgcctcccaagtgctgggattaaaggtatatgccatcactgcccagtgaccctccagcttttttaaaaccagaaaaaaatcggacgtcaacagtagtgactcagattgtttcacactgaggaagctggtgtataatttggatttctaggcatttgaaatcactgtggtaaagagaacctgctgctttgaacgttagtggccatccacgagctttccgtgcagatgggcctcatccacagcctgtcagaaagccctttctccccaccctcaccatctctctaggcgtgagcacatttctctcctgttaatgcggtgggtgcaaagctactgcctttcctcgttatatattttggaagagtgatagtttctttttatctttttatctgcatttactgtctggactattttctgtcacctttgcccacacgtctcttaggctgccttctttctacttgattgcagcgctttccaaagtaagagcattggtccatagagcaagcattggttcattgtacttacaagggtttttgtctagtttgttgttcttttcagcttgttttttgcgctctctctctctctctctctctctctctctctctctcatacagaaggctaaagttttatgtgggcagacttaccatatttccctttatttctgattttgtcatgcttaaaaagatcttccccatcccagggtgcggaaaaacatttacttgcattgcttttctttctgttttaataggagtgtgcacatgcatgctatttatttaatatgcttatttgtggatatcatcaggttttgcttttttttttttttttaataaaaagcatgagttttccaagattagaaggagttgactttactcttaccatctttagcatgtgttggagacagccggatgggggttcagttttatttttcttgtgaatagatagttgatttcatgccaattattgaatactttgtcttttctcagatgtgagactacattctgtaaccataaaaaatcctgtatgctgcatgtgtaggcctaaggatgctgtgggagcttggcacttacgaaggcccagagatccctgctgagtctctcagttccattagcagattaatgagcgctccaacacaccaggtgataaacatcagcagggcccacagatgcgtttcctgggcgtgcctattacgtgcacactgttccctgtatttttcttgagactagtaactattcgcctgatgttgtgggacagggaagtctcatgggccacttgaaggatgagctggaaggccatctagacaaatgctgcctcgtgctcagaacgccatgcatttccgcaattccatactacctccatatatttaggcctgaagccatcccacatcttcatccttgtcaaactgtgtatcacaatttgacttagaaaacatggttagaagataaatgtgtctttcctcagccccaactatttaatttttgaaaaagtttatttatgtattttgagcatagtgctcatggagaccaggagaggacatcaaatccctgggagcttgagttatagacagttataatcagcccatcgtggatgctgggaacggagcttagatcccgtggaaggtagcaagtgttcttaaccgctgagccatttctctacccttctaactcagaagggtttgtatccacttcttattgattaagtattctcagttgttttaagactttttgggaagtttattttgtgatctagatgggaatcttttttaaaaatttgcctacatgtgtatatgtatgtacatcacattcgtgcccatggagaccagaagagggcatcagatgccctggaaccagagttacagatggttgtgagcctctgtgtgggtgcttggaactgaatctgggtcctctgcctgagcaatgagttctctaaattgctgagccatcgcttcaaccttcttgcttaggaacctttatcttattttatttttttgagctcttgattttttttttttgtcatgctttaataagattactaccgggaagatctctgtgcagccttcatgccgcatgtctatagagccttattcctatggactcccaatactatgagtattctatgaaatacccatagtgtatataaaggtgtccaataatatgtaggtccctctattacataaagcatttacaaaaaaattgtatatttaagtcttcagttgtaaaaaaaaaaaaaaaagaacaaaagaaaaaatctccttttgcctagtaaaacaccccctttctgcatagtaaactatcaataatgtaatttcttgctactctgtaattattgatcacttagaacatgagttctttgtttaaatattgttattgtctgaatttcataaagtatctaaatttaagtactctgccacaaatgccccctggagagaagtcaaaatgaacacattgatgccaggcatgtcaaaatttacaatattgggacggtagataaatttatcagctaaggtgggacacatttggacatctaggctggccttaggtacagaggaagacaaaaaaaaaaaacaaaacaaaacaaaaaacaaacaaacaagaaacctctcacaggctccttctttctgtcttcccagacagcctgtctccctgtctgaatgtcctggccttgttacctaggaacctctaagtaaacataccatgtccttattttaagttggacatatatgagctctcatagggagactgcaattatgggagttgtaagctttcagagtgtagaaaacagccatagctgagtgttggaaccgtgcctgtatgagatgcttggtgtctgagcgtcccagtgatactggaaagaaaagaagtttcagtttcttaaattattatattattatatagaaaggccattatttataagcagactaggtagattataattcatgataaatgtacattgagtctaaaaaatattgaacacataaaagttaattgtgcaaactcactgaacctgtcttcacatagagccaacatgtggtctgttctcaaaagctcagcttggataggtgggagtggtgcgcactgtgtctcagcggttcagcggggtgtggtcagaagattaattgagccatgagttgatctcacttgggttgtacagtgacactctagcttttaaggtgggggacaatgacaaaacttggagtatctgtagcttgttaggccaccattaccctcaactatagtaggacagcagctgcctaggtccctgtcccagcctcctcttgtgcatgcagccagggtggtcctcctggaagatgaaatcttaaaatcagaaagcccctgtggcttccatcttactcacgagtgagtgaggggcagctccttcaaaggctgcagccatgctccgtgctgaccccttcttgttgtcacttcttggactccttctttccctctttgcactcttctcttccgctttctcttccattgtcttcctttgtgtcagttgttctttcttcctacaatctctttcccaaatatgatctgtgttgtgtattctcactcagggtgtgtgtgtgtatcatgtgtcatgggcactgcttggtttttgctttcatcttccctgtgcccagatatcacacctgcacatagtaggcacttgttttgtaagaagaagaagaaggaaacaaagaagcagggaagcattggaatactgggggtgaaggtggggtggagtgggagggcaggcaaggaggcaagctcatgaatataaaggtatgtccataggaactatggcctagatcagtaggctccacctctgagaactgctctgaacttgacatcttttctggtaatttcctgctgatgtctttctaacctttacaaccatgtttccatttctttcctgctgttactgtagttctatttgactcccacctggcacagaaggagtgtgacaaatgacacataatatattgcctttacttttctgtcactctttgtggaaagccctcctgagctcctgttgctgcagtaggtgctgtggattccccagtctctgctgtgtacacactgggccattctgagcacccctacccaaggtgcttcttctctctggggcctttatatgcctcctctaggtttccctttcagattgcatgtggcttcagataaaaatcatgaacaacatatggcctgttatgattctctttctcaaactctgccattttgtatatttgtgacacactgcagattttgtaaagattgcttcataatatttgtttgccatctgccgtactctatttggtatcttgctaggatttttgcctccattttaagtgacattaacaaaatccagccagtgcatagacattcctgttctccccttgcctccctaatgtgctggaaaatcatattactatgctccaggcaactagaggagtctgggactgtcattgtgaaccagtgtgtcagatctctgagcaccccctccccccggttatatccagtaatgttattttggtcagatggcaaagaacctcgtgtatcaggttatttttctactttccgccctcctctgtgctacctccttctggagctctgttccagccctttatgcctttagaagtcttggttcccttttagtaagctcttatgatttattactcttatgaattattacttatgatttagtgagtgtagtttttaaaccatcagtacagtttgaaaggcaaatagccagggtgtttgccggagctgtttgaacaggtctaacttttgggttagtagtgttccaggtcactgtctactgagctgctggtagtgtgtctgctttcctgctttccctcgcttcccaggcttgccatttaactggttttggaaagaggtgtgtcctctctttaaacactggggtgagtgtttgtggctgagcctgccatcctagggtcagggacaggttcaatttcactctttggccagcatcacctgaattctcatgagtgtgcttatttttatgtggttatttttctaacccagcttcccttttgacaagaacagggagtcttcgttgaagcagttaagcacggaaattagagggtaaagcagtcccctgagaaaccaagacggccatcaaatagggtctcctgttaggctataagagctattagtcaccatgtcacataagcttgattcttatcaccaggcttaattggaatgctccttttagttggtctgagatctccctcttggagtcggagctcattctgtggatggtgtcagcatctctcccaacccttcttgtcggcttaaggagcatggcttggtcctgtctgttttcatggggtgctcagtgaggagctgctccgctagctgacttccctaggaaaaatctcaagcttacctagaaaccagaatcccagaacccttgtttgaagtagtcttaggcacctaaggctgggtgtgagaactcagagattctctaccccattacatctcctgctccaccatccacttctctctatcaatacttccttatcttactttacagagataattatatgaatggtgtttatggaatttatactctcttatcagaagccatacaaagctcttcacctgcttattattaaactctgagcactcttttgttctattcaaagactgccttcctgaggttacatgtatatgcatgtgttgaaatctgaatatgagctgtccctttgtactcattatctgcacagttagttctggtgcagaaatgagatttgccaaaagctccttcatttttgacaaaatttgagcccagttgattgattatatgtatattcatgcatgtgtgtgcagatgcacatgtatgagtgtaactgtggaggccataggttgacttcacatgtcttttgtttttctctatattttattctttaagactccttctcttactaaatctggagcttggctagactgactggccagcaatgtccaggaattccccctcccccgctcccacgtcttcacctccccagcaaagtgattctatttgcttgatcttcatttttgctttacctacggagtcatcttcccagcaatctttcacttggctttaaagcagaaatatgaagtgccttcgtctgtggtagtccatagtcttagacgcttttatactacctttttttttcttgtctactgaatttcaaagacttccaacttagccttgaatatgttagcttctaagatctgtatggaaagacctttcttttgtttctgatagcatggtgtttctgtctagtttgtctttagaaagtctattttaaaaaccagagtcaggaaaagcagctctttttgtgcagaactctcctggaggtgctgggatttaggaatgtgcccgtttgcacaccagtgtagtgctcctgactcttggctgtggttttcagtagggttcttgaccagtaggggctctgctcagctgtgtggcagagacttgcagatgctgactccctccgtgggcctggggaattctgctgcatgaggcttagggaagaaggcactttgagagctgctggcttcagctacccagggaagtgctgctttccctgcttctgtcaggttgctgctggctactgagaacagaaaggagccaggagttctgcttagtaatagactaactggggaaaagccgactcatcccatggcccccatggctttgttaccaaacaggaggacatcttcaggatgtcttcagttggacaggaggacacgcctgttggtatgcagcagaagattatgagcattgaaacaaatctctctgttctttcagagctgtgcaaacatattctcttatgatgagatgtcctacttgcctggtttggaataggtacttctagtcaaggccgtaactatatgctgcgaacagaaatataatggtagcaagtatttggattctgagcatccttcccagggtctacccaccccttctagattgttacctgagcaggctgtggtcaccacacaagtgttttaggcatttttctttgaactatgtaattagagcttccatatcagctgccaaatgttcctgcctctgttaaaattttgttattatattttattcattcattcatttattcattcatttattcattcagtttgtgtgcttgtctgcctatgggcatgcatatgctgcagcatatgtggaggccggaggacagcttctgagcattgaccttctcctccacagtgtgggttctagggattgaactcaggtagtcaggcttggaagcaagtacttttatccactgagccatcctggttaccaatgtgtcctactcttgacagatgtttttctttagagggatgaagtatcaagacagttaggaataaccagaagtcattctgagtctagcctaggaaaagatgtgagtggtgactcggccaacaattctattttaggttaaaattgagatctgctctcaagaggtctctctttaggttcttaaaagcagcttttaaaactaagagaattactgcaatgagcacattacttctagatgtggcctccttgctgcttactcagatgtgcacattctggttatgggtcctgcagcctcaagtcttaaaactgttacattattccagaataacatgcatcaccatctgaggcttacaggtcggagcagtggggcaaacgaaagtcttcggagggagctttgcaagttagggcaaaagatgggagcccaccatgtctcctgtaaagcagcaataatcctggtgtccacattgcagggttgcagtgtggttcttaaggtggtattgcacatgaagcacaagtcagagcaccatctgggctgccgtggttagtaagtgagagacatttcctcctgcttcagtgatgcgttaggttgcctgggagagaggaggaatagagaacagggaatccggtgctgcctgagacataaatatctgatggtagagcagggcctctcttctctcaaaagctgacgtgtcagaatccagttaaatgcacttgacttacatatatgtctagaataatagggaaatattttgatttttcacctttcttataaaagaaaattttagttctttctttagcaagggctccaactccttttttagcctaggtgagccccgcaatcatgtgcacacacccctcaatacacagtggacagtaaccgtgtatacacatccctcatacacacagtggacaataatagtgtgcacacacccctcacatacacagtggacagtaaccgtgtgcacacacccctcacatacacagtggacagtaaccgtgtgcatacacccctcacataacacagtggacagtaaccgtgtgcacacacccctcacatacacagtggacggtaaccgtgtgcacacacccctcacatacacagtggacggtaaccgggtgcacacacccctcacataacacagtggatggtaaccgtgtgcacacaccccctcacatacacagtggacggtaaccgtgtgcacacacccctcacatgcacagtggatggtaaccgtgtgcacacaccccctcacatgcacagtggacggtaaccatgtgcacacacccctcacatacacagtggacagtaaagtaaatcttcaacaaaaaaaaaaagagaattcgagtcttactgctttcatcatattcatttttaaacagatgaagatgaagatggtgataggattacagtaagaagcgatgaagagatgaaggcaatgctgtcctacgtaagtgtgctgcatatgagggctgtttcaaaaaatgcctttgtgtgtgtgtgtgtgcgcgcgcgtgcgtgcgcacgtgcttgctcgcatagttcagatgacatctcgcaggagttgtttctctcctgccaccatgtgagttgtggggatgcagctcaggcgtcaggcctggtggtacgtgctcctagctggtgagccatctcatcagctagcaaacaaggactgtttttaaagactgttaatgtaattgaggatgctgtttcttgggcacagtggagatagaaatggaaccacagttgccacagcatttttatgtgtaacagataaggttttcaaagatttccttatgtgaaagttaggggcattattttcaaaagacacttactgatcatatcatgaacattaagaataatgcatcttaatgacttttgcattaggtatggtgcagactaaatggactatcaatttcctgtattttttatgcagtacttaaagtaacggctcattaaaaatgaacccctgggctctaaaaaatttttcaaaatctacttttgactggagatgtctttcacccttccagacttcagctataacatagctgcaggcttgtggatgcaggatttaaagatgtactcctggttgttttatgcacttcttgcaccttaaaatgaactcacccacagtgatctgagtgtgtgtgttgggagcttgctttggtatctcaacgttcactgaaattttgaattaacaacttgtcccgagactaaaataggtgacagaaacggtacatttcaaatgcttcagaaccaattgagaaaccttcataaacaaccaaagacatatagcttccctgagccccagtttgagctttcctcccaagttttattttaccttagtaatctgattggaaaaccttttctgtgttctggtggcaagcaccactctagaggggagccacagctctgctgtgggtccctggcctaaggcagatggtttaaccttcagtatcacagttgcctcatctgtcagtgtgtggtgggtaatagcacatgtccttcctattgctcggggttgtgtaatgatcaaatggatgatagatgtgaaacgctgtcacatgcaaagtattgttacagtggacacgatggacaaggccagacatctgcttttctcagagactctaattgtagccaacagttagggtgtatgttttggagagcccttaacttcaaccaggatattgtttcatcgtaatgaaaactgtaaactgtctgtgtgggtttccgccaatagttttaatttagggtaggaggaaagagaacaagagggatggcatgattaacagagcattgcattcctaccagcccagagtaggaaaagtcaatttcccattgacttcccattaacttatgtgggagtctttgtgtactgagaatttagagctgagatcatcggtacgtggaaggcagagcgggattgtctttgccagggcagcattgctattgatggattggctaactctcccgagagcgtgactcctttgtttttagagaacgcatgcacacagacacagacgggttctggttttctaacctaggtctttggcgttcagtggacccccatataagcagagtggacttcccagaagaccttacaaactgtgcctggtgaaagagttctgagtgtgaccctcgtgatactgctcacctttccatttctgagtgacagatgtgtaaactcagagtttgaaagacttttttaaattgacttttacttatttgtgtgtctgtgtataggggtggcaagtgtgtgtgtacatattatgtgagtgagtgcaggtgtgagtgcacatggaagtcagaggatgaccttgggtgtcagtctttactgtctgcctgtttgagtcgaggcctctttgatgtcagccactgcatgagccaggctagctggcttttgggcttctgagcagtctgctgtctctgacctccatcctccatgctggtggagctctgggaatatgggcacagcgaccacacctagcttcacatggattctggagaagtcctcatcctttcatggcagcagcttccccactgggccgtctcctcggcccttaaatagtgactcactctatggtagatacaagcccgagattaaacctggatgctcatatttcctaagcatgtgccccattgctgagccaccctttgtcccctcatctctgtttggtaaatggttgagagacatgcccaaggccttaaagctatattgaaagttcagaactggaggccgtgaagacagatggctcagtagggaagctcctgctcctgccaaggacctgaatttggttctcatcactactttgggtggctcacaattgcctataactatagtccaaggagatttgacccctccttctggtctgtgggtacccacatgcacaaacccccacacagacatgcgcataactgaaagtaaattttaaaaagaaagaaaatatgtttggcctttaatctcactgttttcctggttgccactggaaactcctgctgggaactgtggaaagagcatcatagaattcgaatgatttgtttatgcaatatcttacttgtgctctctgcaccatacattcctaataaattattcttgtttgtttgttttgtttttttgagacagtgtagccttggctgtcctgggacttgctctgtagaccaggctagccttgagatctgcctgcctctgcctcttgactcatgggatgaaagctgtgagccaccactgaccccagctttatgcatgttttttaattgtagtacttagtcaattttagttgtagaaacatgttagtcatgaccttgttgtcatacagcataaccttgtaagacatgtccttaaacatagtccctgagatttttttgaaagatacctcttggtctgaaaataacacagttgcataattggctatccttttggtctgtccccattcttttgttttgttttgttgttttttcgagacagggtttctctgtgtagccctggctgtcctggaactcactttgtagaccaggctggccttgaactcagaaatccgcctgcctgtgcctcccaagtgctgggattaaaggcgtgcaccaccaccgcccggcatctgtctccattcttatgactggaagttcttctgggcccagctctgtcatagagaaccgtgtggatcaaactccacagtcgtgttcatcactagtcttcaggagcacccatcgaatactaggattttgcattggtatttatttattgatattttaaatatcttattaaattttcttttcctttctttctttttttttttaatacaaaccaattgcagttggtttccactccctccctccacttctcccagtccctcccttccctcccagatccactgttcctccatttccctttcggaaaagaacaagcctcccagggagagcagctaagcacagcatacgaatatacagtaagataggtacaaaccttcacatcaaggctgggtgagtgaggcaatccagtaggaggaaaagcatctcaaaagcagatgaaaaagtcagagacagccccgcccccactgttaggagtgccaaagaaaacaccaggctaacaaccataacatctctgcagaagacctaggtcagactcatgcagtctctgtgaggccctaggagctctgcttggttgattctgtggtctgtgttctactggtgttcttgacacctctggttcctacagttcttttccctcttcctctgggtttccctgagctccaaggggaggggctcgatggagatttttagcattaagtacttacataaaaaaaattggagcaatcttatactagaaaacatacctgaaagctctagaagaaaaaaaagtacgggcactgtggtggtttgaatatgcttggctcagggagtggcagtatttggaggtgtggtcttgttggagtaggtgtggccttggaggaagtgtgtcactgtgggggtggactttgaagctcttataagagttgctttgggaaggagttacagagacaaagtttggagctgagatgaaaggatggaccatgtagagactgccatatccagggatccaccccataatcagcatccaaacgctgacaccattgcatacactagcaagattttatcgaaaggacccagatgtagctgtctcttgtgagactatgccggggcctagcaaacacagaagtggatgctcacagtcagctaatggatggatcacagggctcccaatggaggagctagagaaagaacccaaggagctaaagggatctgcaaccctataggtggaacaacattatgaactaaccagtaccccggagctcttgactctagctgcatatgtatcaaaagatggcctagtcggccatcactgcaaagagaggcccattggacacgcaaactttatatgccccagtacaggggaacgccagggccaaaaagggggactgggtgggtaggggagtgggggtgggtgggtatgggggacttttggtatagcattggaaatgtaaatgagctaaatacctaataaaaaatgggaaaaaaaaagagttgctttggttgtggtatctcttcgcagcagtaaaaccctaactaagacacacacccaagataagagagaagatggcaggaaataatcagacttggggctgggatcaataaaataaaaacaaagagaaaattacaaagaataagtgaaacaaagagttgtttctttgagaaaatcaaaaggatagacaaaccgttattcaaactaaaagggagagagaatagctaagttaacaaaatcagacacaaaaaagaggacatgatagatagatatccaggaagtccaaagaatcaggatgccatactttcaaacctttacttttcagaattggaaaagctaaaagaaatggataattttctcggtatttttaaaattcaaattgaagtgctgggtgtggtagctcatgcctttaatcctagcacgcaggggggagatgtctgtgagtttgatgctagcctggtctatgtagtgagttctagtccagctcaagctacacagtgagacctgttcttgaaaataaacaaataattaaaaaataaattcaacttggctctgaaaaggatttgttgcagagtgtggcggcatagggacatcccgctagagttctgctgcagttttatggtaataacaaggtacagcagcttcggctttcctagggaactgggtaaaattgtagtcactgtgaggcatctgaaggagctgaagtggagatgcttcacctctgtcctttaatcattttcttctactgatgacaaaatgaagagagccaaaactgtgacattggtgtcaaagcttgctgaatcatccccctccccccaaattggatgcaaggattttctggctttaggccaacacaaacctaagtttttaccagtaatttaaatagatttttgtattagacctgaaaatgttggctttttaattgaaaacttatcaattatttaaatcactagcagctcgaggctgttaattttatgagtgctgtaataatggcatacagtggtttttgatacatgtgaggcagtgagggtgcgtcctggcagctggctgtgtgtcgctaactaaccagcaacatgctgaaggctgccgtcgcacatcaggaccatttcctataagttatttagaagttgtattcttttctccattcgatatatttttaagagataatgagaagaaaacaaagctataataaattgtcttttaagaaaatgtaaagtaatttggtctccaaggagatatttaatgtattgagagacttcagcagccaagtgttattacagcagcatggtgatagctctctgcattttgttatgagtttgtgttaatcaacaatctgtttttatagcgtagtttcttgtaagttattctactagaatattccacttctgggatcatggcttctcctctgacactattgtatctttttaattcctccataaagtatttttttaattagaatttgaaatgctttattagaaaagcatacaacctacatattctgaaaactaaatacctgatcattgcgaattatttaaaggcccctgttaaatattcccttaatgtagtttaaattttgttgtttttcttattttcccatcttattttttagagagattaaaaataggtgggtgttgttctcctgtagtctgttgtattgcagtgtggcagtgccatggagtctttggtgaagggcttgtaacgctaacctcttcctttgggtggcctttcactgagaatacaacagcccactgtaccgctgtgaaggattgatatttagttctgctcagtcctgtgtctagcaaaggacgtctgtgcatcagattcccacactcctcctaggcttgtgtgagtggagcagagcactgacaagataagtcttcctttctcccattctctctctcttattccccacattgccagaagcgtacaggacgagctttgttgtagtgttcccattattgcagagacctttgtttccatggagtgtaagtattccctttggtatacttgaccactgtgtaccttgttagacagtgggtaccgtcagggggagcactctttgacctttggagcaccatgtaaattgggctataattatatttaccgtggtcttcataacttggagactgcctctaaaatcgtgttaacttgagtagagcaggagggcacctcagaggtctcgtgtgtgccttcctttcacaggtaaacacatgagcctttgacctcggcttcagaaatgtgttaggggcacagagttggaccaaggaggcctggacagagactccctggccgccatctgtttcaagtgtgtgttgtgttctggtagctagtaagttttactgagaaaattttgtacatactacttttttttttcttgattatttttaactacattgtttatgcagattatggtcttctgaaaattgaaatttcttggccaatttttatcacaaaatatgctgtccatttgggtattttacatataacaagtaaaccaaaagtaattttgttttctcatcctattcaagatacacacacacacacacacacacacacacacacacacattggtgagaaaataagaagaataaaacttattttcagagctagatcatcttactttttctttctgtattatcaaggacattttgggggagggggtctcttgaaatagagatgaaaatgctgtggcttcttctttttgcctaccttgtggcatagctggggcatgcccggcatcaaaaggggatttgtatgcagctttggaagaaagggaaacacagtaggctcagcctccaaaactctggatctccgctacagcttgagtccccagcattttgacattggtattgtttgttcatacttgatctctgtggagaatgtaaggagcgtatttataagggaatgtcccatttggcctgctgtctccatggccgggtagtcttgttatatcgaggtggacggcctaagtagcagtttagacccacctcttcagagaggaaagcagaagtttgaggtggcaagtgagagattagtgtggacactgcccacgctcatctcgacgagactcaggcttctgctgagaacacttgaacatattggacccattgctttgctaatggaattttctactaccagggcacactgcattagctaagctgaatctcacctgctgttggcttctcacacttctattaagaccatctggaacttcctaaagtcctttataattttgctagccaaaacaaatggtatcattactaaatgtggtcaacttgctattatgttccaaaacattactaggtacgtgtgcgcagtggcattagcctggaagcggacttagagttgttctctgttggtcttttcacagaaaacctgtggttttctttctccttatcatctcagaccatgaccacctatggacccttgtcatagagtaagttaggaacagtctccttgacgcagagctgtgagttgttagggaaccaggggacctggcattcttttaccagaggttcacaccaggctacatagcacctatcatttcaggaactctaaggattccctaaaggtctttgtctgttggaaggcgtgtgaagaagagatcgaggaaatcgccctgaataccgaagaaggccatctagcttttgtccgtgaggaagttaggaacaaggttcagggagactgcttaatgatgactccccgacctgatggctccccatttccttcctgtaagcaactgcttggtgtttgcataggtgttatgtgtaggcaccatccagtagttcatgaaggatatggaaatccaagggtttcattcttttaccagaggttcacaccaggctacatacatagcacatatcatctcaggaattccaaggattccataaagcccacagagagcccaagtggctaaacctgctgtgaaagaataaatagttgaggcctggctcctgccctcaatgagcttctggaagaacacaccacagtcttgtgtgcacctcttactcagggtgttattgtaatgctgtagggatgaggacaagggagggctgctgacacctccggggagacagagctaacccggctctgtagtgggccgagcagttgagcagccttattcagagctttctgtgtcgcctgctgtcagaaacattgtttttctgggttcagttgcttaatggtaagaggttcatagtgctgtgcctttttttttccctaagtactttatagaaggtttcctacgtacctttttttttttttaattttgatcttcctagtgactttatggtgagtgaggcaggtaatctccccattattacaattgactatttggacacaagcctgtgtgcctttccttaggtcacaactagtaaacatggctgcagccaaggcttacttgttctgtgattcactcactcattcacctactcagctagattccaagagccaggatattctgggtgataccacactgaccaaggagcatgcaggaggtgtgcacggtgatgtgcaatccaggtcctcccctcctctcaagacacaaatacttaccttccatgctgctgggcagcagcggagagaaacccagattaggactgtaaagccaacccttaccaggcagaatgacaagtgataaatgctggggcatagggtgcctgtgaatacggaaaagcactgaatccatctttgaggaaggacagtggaggcttctggaagaacttggtgtcctggtggggtggacagagcccgtgggactgggaagggtgttctgggcagaggagcggtgcatttaaagctttagaggcctggggaattcgggagaagctgcttgagattcagcctgtagggataacaggagaaggagggtgtgtgggagaagagttctaacacacagacatagtgtgggctgtttcagaccaaagacagaggtggctgcaggtgtaaaagggcaggagatcttgtagaggtcagatgtgtgaacccaggtgggcaatatggaaagggaggtggccagggccagtccaagccatctgttagagcacagcatggcttggtaaactcaggtggcagaaaaccagactagagtccaagggagggtagagaggcaggaaatgcagtttttgattgtagcatgggaggaggctctggtcaaccaactagatatgctccaaatctgagagagacatctaggctggaaataaagctttgtgactcggcaggctccagttagtctccatgactcctctggtgatggagacctggggaagtggggcaggggatacacagtgaaagggagggtgaataaggagccataggggccttacctccattaagggctcattctcaggaactagaatgaggctcgctgaggatgggggtgctgnnnnnnnnnnnnnnnnnnnnnnnnnnnnnnnnnnnnnnnnnnnnnnnnnnnnnnnnnnnnnnnnnnnnnnnnnnnnnnnnnnnnnnnnnnnnnnnnnnnnnnnnnnnnnnnnnnnnnnnnnntgcagagggctttgtgcccttttctcagccagggaagatggctgagctcacacactgtgggagcaatgaatgcagaagccagggctttctgctagctcagcagtctgcttggtgattctgtctgtttagttaaaggtttggcggatatgctacccacctactttttaattcttaaatagtaagcacgtgtttcatgttttaagcattgaactagaataaaacttttttttttattgttcactaataacctatgcttattggtaagccatttgtctcacctattaagcagttgattagggtagatgtatgggaaattagaaaaatgtatgaggtattcagtattgagtccaacatgtacaggcatttgtggggctgagggttgtcccccttcatagagaatctaaggcttgtaatattaaactgtgttgttttgaactcaggttgttgattttcttttttaatatcatagatttccattaaaatttgagttattgattgaattatgctgttataattagaattgggttcataacaaatagggacactgcttgataaacttgcaaacaaaggaagcaattgtacttgttgtcctttgctgaatctggccttcctttggagattaattatatttttggataactacactaaactctgccacattcttattaaaactgttaagggttttaaagaacatctcagagagactctgaaaccgatccaagcctggtgctagagattccattagctatcgtaaaactgattaatcttttacctggttagcatattgattattgctgcaattactgcttgtaatggattatgggagggacagctgaagcaagcgcactaactgctgcctgtgggattcgtttaggcacctgttctatagtttctgtatgtaatctgcgctttacatgcgagagtgcacctaaggtaggaagtgccaggctaagtgttgctgattgctgagccttgggaggtgatgggctgtgtggatttgagcgtatgaagtccttcactcatgctgctgctgctgctgctgctgctgctgtttagcctgggatttcacagtaacctgggtgataaggcaaacattctcactctcctttggaagccacgatgcctgaggagattgggtgactttctgagggctgtgcacagtagtgattggtagaatcagggtccagccccattttagtcagtacacacttcacaaacacctactgtgtgtagatcgtatgttgaagtaaaaatagctaacatgtggtagatgaccacattgtgacttttctgttcaactcatgttagctgtcttggtgtctgaggtctaggcttctctgttaggacttgctttttttcttttgttttggtcaagccagagtcttgtctctgccatcactgatgattttattactatttagaacaaaatgggagagaataaatgaggagaaggatgcaaagacagagggccagacttcattaaaaccagtggtttagttgtggtctttgctatttctctgtgaggcttacagcactcctctggctggaatccatcttacatcccagcagagtgagatacagcaaggcaaggcagcattaccccactggtgccatgggtcaggagacagccagtgtgaggttcccagggatgggccctccaggcctcgagcgcctttatcattcacctgggcagcaacagacctagcagcttggcagcctcgtagcctggtgagagtgctctgtgccaatgtcctgcacatgccccgcgtttttcccttgcctgtagggagtgctacataggcagcagcggcccacaagctcacagtgggttcacaccatgggcttggttgctacccagttctgtgtgtttgtccatctctagcctaatatgtcagcaggggaaaggcacttgagtttgagagagctgtaagaaagtaaaagtaaagccgaattaactgtttgagagaaaagtcttaatcagcacagtgtgtatcactgcagagggactctgttaatcatagtacggagagctgggtatacactgcctaaatttttcacagtggttacaaacatatatgcagttttccagttgatttggcacagtgctaagatgaaagtgaaagccttttttatttattttggggggtaaataaataaagctggaaaacaggtcaatttcatgcatgcaaggttttatagtaggggaaaggcactgcacctgtcctgaccctcacactcgaggttatttgttctcagacttgaccccgagcacccgtttcagacaattctataattagtttgttagataaagcataaggatatttttttcctgatttctaggaccatagcaaagtagaaacctactgtacatagcagttaattaaagaaaagcagtaactatgggcatggccacagtgctgtcttgtatcagtataaaaaggcagggatttctttgacagccactgattggaaagttgcttgcagccttccagaagcaagggtacatgctgtggatcaataaccggcaaatttcccattaaaaagaatacctgagcaatgttccaaatagccactggcatcttaattttccgcagaaacctcaagtacttgtgtgcctgccgaggacaagtcattttcggacaatttttccagactacttgttaacagttattgctgtcccgaaaggttgacagccgacatgattgatatttcacttacctgtcgtcaccgtgtgagtaatggcaagtgcactgtacttccttgcttttcgggagcagcctctgtggccctagtgtattccaacatgatttgcacatttttccgctgtgcgtatttaagtttttaggtccttagaaagagagaattgccttcctttacagtttgaaagccattgcaggagggctgtgtgcatcttggtcatcagccagctgtccctcctgcccctgccaccacggtcaccttcaccttccttgtttgcagtgcagaacagaaggccttggctttctcagcttctgatcttcacagtgatgcagaatattcagacctttgcatattttggaggaaaaagattgattctaaaataaccttaatgtatataacaccaataaaaagattccagtttttaaaatttatttttattttatgttcattgctattttgtcaggtcccctggaagtagaattacagatggttgttagctgccatgcgggtgctgggaattgaacagagtcatcttgaagagcatcctttggaaaagcagtcagtgctcttaaccacaaagtcagttctccagccccaagatagaagggttttttagaatgttagtaaaaatcaaatttcaggaatttcctgaaaatgtcgtagttaagtggtatgtgcatatttaaatataaaaacagcaaaaatgagaaatggggagagagtgtcctgcttttgataagcccttaaagcacaaagtcagggcgggagagatggctcagtggttaagaacactgactgcctttccagggaactggggtttgattcccagcacccacacagtggctcacaaccatctgtaattccagatctttttctggtctctgcaggtaccaggcatgctagtggtggatatatgcaggcatacacataaatacccatacacataaacaaataaaaaaacaattttaagcctagtcagtggttttcattgtaggtatttttcttcatgaacattattttcttgtttgttcagcttaaagaagtataaaaaggtacagaagccatctccacatataggcagataggtggagcaggcagtgttccaggaaacagtgtgcttagtattttgggcttattttatgagggacagtgagctgttgttttactcaagaccttatgctttatgtgcctagaattttacagtaagctttgatccatcttaaagtgtgcctaaagccaaattacgaatcagaaggagacttgttaggagactgcttttacatgggagttctgctgtccttggttgagtactatgttgttcactgggcccagcagtctcttcaacttcagtcctattagctctgtgctttatacacaaatgtgtgtgtttgattgactgacatgtgaattcaagccaaatattgagcctattcattttgctttacaaatttcagaggaaaagcacaagaagcaatttgagtaatttctataaaatgcttttttatgatttaaaatatatatcattttaaagtatgttaaatactaacatggggtcttagttaatactgttagtcttaaagataaatggtggtatggacgataaccccctactagacttccaaatcttgaatacattcactgtagcaattttgatgtgcaactagagacactgtgtactcaaggctgatgtgtgcataccagccatttacaagagtaccatgaattaaacagcccgtaagtgtctgtcccagtgtccatacattactgagtaatctctttctattatctctttgcagtattattccacagtaatggaacagcaagtaaatggccagctaatagagccgctgcagatatttccaagaggtaatgttgaacaaattctaatcaacagtgattatttcagcaaactgtttgatcaccagctatgctttccaaaggtttaaatgcacatagcatgatgtttagctcataatctgaaaaaaacaaaagaagtattcattatcatgggggattgcaagctacattatagttatagcagataaaatatctaatctactagagtaaattaaactaactagattgtttttttttttttgaagtgcatacttacattcgcttaaagaactctttgggagtccccatgattctaaagcaaggcagatggctggctttagttctggacttatgacttgtggctcataatgatggtgaaggctgctgttgagatgagagctgttagcttgtgtggaggctgtgagaaatggggctcagggacagggctttgggcagagcttgatatttgtcttgggatgggggaggtttttaaaaactaatggggccctcttcttcagtggcagttgatttacatgagggcgagactaagtgaatccctcctttagggtgggcagtaccagccctgtacgggctgtgattgttccttgtgtaaatatcctctcaaaatttgaacagtagtgaagagtgacttagttataccaaagtaagtttttaaccattatttttgccccacttgaaatccatgttttctaactaattgaacagaccaggaaatcctctaagtaactcttctagaaatagcttaattgaaataattaaaagttaaactcacttcgttaactaatactgtacagataatcatggtatgagttttccaattaaacattctagactttcattacctgtaactcagaagtttgaatggctcaattaaccactgggctctattgtagggatggtctcaaaggcagttggcttggccagctagggaggagatccgggttcaagtgcaatctacttctttgggcatttgcgtgggcagtagaaccagggggattatttcattattagtaagaacttaatggagggcaaagtaaaaggataaaactgtgctacttaagatcagtggtcattcaaaagaaaggtatgattaatcgcgttctgtggcgcttgactgaacaggcaaacagagaggctgccgtgcttttgtagctgtctcctgacagtgacccagattatttccttgttttctctgtgactttagagttggagcaaacttaaaaattatttccttcacaaagaatagtgttttaccagctgaaaatctctatccattgcttctgagctctgttatggcaatcccagagaatctagtcaccaggctggagggcttttctttatactaaacagtttccttctctccacaggaactcttctcagttcagttccctgtcactgtccaggcagtcttgtcagcaaggctgttcctgtgctaaaccccctgatggtggcagccattctgagacctcagctctccttcctgtccctcccagcagttccacagttaggtttttctcctcccgttgtatgggctcttaagaagcctgagagctataaagcaactaagcatttagtatactgcgagtgagaaggtgacttaaattacagtttgtttcttgggaaaggcatataacgtcaagttctagtgggtgtgtaaagggagtttgaggggttttgtgcggtggtgctcaacctgtagctcacaacccgtttggtggtctaaacaacccttttacaagggctgtcttagttatgttatgattcacaacagtggtaaaattacagttatgatgtagcaatgaaaataattttatggttggggatcactacaacatgaaggactatattagagggtcgtagcattaggaaggctgaggaccactggtttagtttaatgctataaagacacagctatgacatgctgtgatcacttcatccctggcataactaacccatgtggcttaatatgcattgaatgtagtctctccaggccacattgagaatttcaaaatggtagtccatcccccttctcggtgctgtgactcagatcttttgggctcttttcgattgtcttgtttggtacctgactacctcactacagatgtagatgcccccatgtgatgaaatacatatttgttcaggttatattttataatattttaatacggactagagactcttgggaagaaggagtctcagttgaggaatcacctgtctccattagactgtcaggttttgacttctgattgatgtctatagtgccagccctgggtatactatcctggactgtattaagaaaggtagctgcccatgagtctggaagcaagccagtgaacagccctctatggcctctacttttgttcctgcttccaggtttctgccttggcttccctagatgatggactgtaacctgtaagctagaaaaaaccctttcctccccaaggcgtttttttggtcgtggtgtttatcacaacagcagatgtgcatacttggacagtgtagttagaatgtgggcatggtaaaaggttccctgggtcttcctgattggtgagaggctctcaagccctagaagggtctgtgcctaggccccatgtttaaaagaatctttaggctgagcaagttgttgggtctggagacaaagattttactctgatcacatatcctcctcatttcaaggagcactgttgccttgaatagcattccagtcttagttcatggccaagtcttccctgtggctcagagctgtgttaaatattaataagtatgaaaattggttagcattatagtaagtgccttcttaacttcaggatctatgaggttgctggggttttgaatgcgacatggctgtttagatttctagtcacaaaggtttgatgggcagttgagaagcaagcagtgctgaggttagagaagacagctggaggccttctcagaccttggctcacccccatttgcctgcacaggttaccgcagaggcagtcgtctgagagaatactgaggcttccagggctgggcgtcagaagaaggcagccgttgttttgttaatctgtattttaaggaaagaagatttggaatcttaatatattaagtatcctatacgcttaaaatataaaaacatttattcatgtttatgtatttttggaatattaatgtaataaattcatttaaaatatatattcattttattttctgtgtatgtgtatgcctgtgtaccatgagtgtgtgggaactggagaaggtcagaagagatgtttgatcccctagaactagggttagaaatggttgtcagtcaccatgtgggtattgggaacagaacctgggtcctctggaagagcagccagtgttcataaccactgagctgtctctccagccctaataatataataaattcaaatttacttgaagctcccaagtgaaagtgaaacccataccttgtaattataatgcatgtcttcttaagcagcttgatttctgttgtcaagaaacaaaaagaaaacaaaatcaaattcatccttctctagacagagttgacagccccttaacagcctgctgtaggacactctagtatttgggcagaattggtgtagaacagggatagggagctcgtgtttgaaacgtgattacgaagcacctgctggactagaaatatctcactgtagcccacggtggtgctgggaaatccctgtcagttttcctagtcctctgttaccctcagagctaagtattcatggacatgaagattttctggaaacctcattaaattatatatctgtttaaatagtccagttgcttatggctttacaagacttgaatatacgcagacttgcatattccatcttggagttcccagcagtctttttggcattcaagaaccctttctccacccctccatgccttcaaagcaacaaaagcagaagcctgctgtttagcacgccctttgactgccttgtgcagttctgtagcgagggaagactgcagacatctgagccacgagaggaatctcatcattctagctcggctaatgttttggtgtgttttaagcagaaattggaattcatatgaagtggtgtcagaaagctctgtgcatttataaacactcactcctgcacgttaaaaacccagttcataattcccaccttgggtctgggggccacttttcaatcatttctctctgctaattttggtgtcaccctcatttctttttaaacgattcattttgagcaaatttgtaaatggccctgatgtgttctacaatttagtcaattactgtttcagcctgcaagcctcctggggaacggaacatacatggcctgaaggtacgaatttcaataattgtttcagtaaagttagatggatttgtaatgctgtgttccacttattgaaatgtcaaataaaactgcactttctcaagctctgacaagcaatctttctcctcttcccccgccccccattttcgagtggtggaggtggaagggccacatctgtatttgcttacaatgtgtatgtacgtggatcctggcctttggtgctgtattttttcaatgacttggagttgttttgttggtcagtttctccaggatgatcctggggtctgttgtccattaagattgatttgagtgagagcacagccttccttgtggtgattaattaagctcgtaagcatattgcacacaggctgcccttcctcttctctccacatatttatgcttggaaaacatgtctagttaatgtctcctcattgttctgcatgttttaaattctgaatttctgctcaaagcttcacatctgaaagaaaaggtggctattttattaggctcgagtgttttataattaattacttgaacctcattttctagtgaatgggatgcagttgtagagcctgaaggggtggcatcctgagggttgctactaataccagataagagcttactgtgcttgcatgggcagcctgcctttatgtcactgtagatagcaacctgaggtcggtctctctctctctctctctctctctctctctctcctccctatttaagtatttgaataatgccagggatatcagattatgcaatctccagattgtacacttctgtagcatgtatactgaatatactccagcagtgggtctgtctagcaacatgctaattaaccttcatagtgagatgagcattgtgtgctgaattataggctaattagaactgtgtcctcagaacacgagactgacccaacttctctcttcacttataggtgaatacacgggctgggccatctcaacacaccagccctgtggtctcagattcgcttccaagcaataggtaaggacaaacaagggacgtgtgctctgctgtgctcctctgtccaggtggctgtgggctgggaagacgctggtgcaacacacttgtctcttctgtaagataaaaagaataggcagctgtaaagaaaacttgagtagctagatagctcttgctacatattgactgcagagaaagaagacttaatatagaaagatgaaattagagacacatgagatggttcagttaataaagatgaaattagagatatgtgagatagttcagttaataaagcgcctgcgggcaagtgtgagggcctgagtttggatccccagcacccatctaaaatccagatgtggcaccgcatgttcgtgactgcttctggggaggtagagacaggcagatcccaggagctcactggtcagtcacctagctgaatccatgagctacaagtgcagtaagagggcctatcacaaaatgtaagactgtgactcattaaggaagatctcatacatgaacctctggcttccacatgtgcatagatatgtgtacacactccctacaaacacacatataccacacacacccatgcaaaatagataaataagtaataaagattcaaagatgaaattgacatgtgaaatagttaattctgttctaagcagtttttcccgagtctccaaattatttatatagcctgtttcaagtcttgatccagttacaaactgtgtgattcttattaagtgtttcctgcttgcccatcttttgacagtgttattatctgctggcatctttaccagacagagtcaggggaagagtcaaatggtgacatttaactagaccagcagtgctgctcattaatggcatcttgcattgtccaggagattaaaacgactgtatcaagaagatcgcttttgtcacttcatgctagcgtcaccccactctgggacagatcttaagcctttcatagtcttcttttatcccccaacttaactgctacaatatggcaatgcgcaggtgttcagttagcctgcctgtagacattcctcaccttgtgatgctgggaggtgcttgctctgtattgcagtcacagtgcggctggaaagctgacagaaccacaagagcttcttccatcctgcactgaagggccctggctttggggcttcagtcagtgtgtgcacagcctttaacagggtgaggtgcagcttaggcttctgctttcccttcacatccttctgtcttcctctgtgcagtcttgggtctttacctgtgggtttctggtttgactctggcttacagttttggaggttgagagtccatcttgcctggcccaggcagtggtgaggataccttgtcagtcactcgcctcatggtggggacatgtgcaagagtgagtgcacctaataccggagccacagactctggtcctatgctcctgctctcttctttattgtctttaattgaaacattttatatgtatgagtgtttgtgtgtatgtattagtatgtaacatgtgtataccactgccccaagaagccagaagtggtcggagctcctggaactggagttactcagatggcgatgagcctccatctgagagctggagaccaaaacaggttctctgtaagaggagcaagtactcttaaccactaagccaggtcttgcttgtattttttttctttaatttttgagactcttgctatctagctcaggtggaaatcaaacatagcagtccccctgcatcatccccccaagtgctaggattactggtgtgtgccaccacactttctctacaattccaggtgacctaaggtccttccactaggttcctcccccaaggctgcttccctggatactttactgtggtatcagtatctacccaggagccttcctgctgagaacacaggctctaaaaggcatctcattaacagttggttccatcttaaagtacagttagctagctagtcaccagcatgtcctttgcctggtcttgtgggggaggtgtttgcttctccacagagggctttggacctgccagattctggtttgcatgcactgtctccatactgcctggacatgtgagccgcggtcttgcagactagaggcgtataaatagaggactgcatgctcacagagttcctggcaggcagaacggttcactggggccactgatcccagaaaagatgatgtgcacacagatggccaatgagccctgggaagtcaagctttcccctggtattttagattacacttttcaacagaattgaaaagatttctctctctctctctctctctctctctctctctctctctctctctctctctctcttctctctctctctctctctctccttccttccttccttcctttctttttcttttgttttttttgtttttgtttttttttttgttgttgttttttgtttttcaagacagggtttctctgtgtagccctggctgtcctggaactcactctgtagaccaggctggcctcaaactcagagatccgcctgcctctgcctcccgagtgctgggattaaaggcgtgcaccaccaccacctggctgaaaagatttcaaatcatagaagcagtgttactttccctacaagtgaggattagcttggtgtaaaaattgtcatgtctcttcatggagtacagtaagattcttggatcagatggaactttaccacctgattatctcacgtttcatcttggtctcttcactacgggatatggcagcctcctagcttgtaaggatagtggttcctgtaatggaagaatgttaattgaaaaagtcctatgggtgttttaatgttaccctgcattggccatgttctgtgccccaggttgaaagctaatcagcagatatttgttgagtatctcttactcattagttgctgtcctaggagtatgacgtgtcaatagtgtcgtgagggaagcagatacatgcagagagaacagtagtcaggaacatgtttctgtttgaactgaatactcaccgctggctccttggggaacgtgattgcttccatgtagacctgatgcacaaggaggaccaagttacatcacaatacagacatctcagctaaaggtgaatgtttgtgtacatgtttgtaagtaggttgatttggcaggagcacaaggataggtgaggggtaggacaggggtgtaggagttggggagagcaactcaagtgctggaagggaaggatgcagatgggagcaggtcatgtggggcttggaaggcccatcagtgcctaccgttcttgtcctggcctggagaccagagagggctcgggcagcacagggcaagcaaagcccagtgttggtagaaactgtctgtggggagcagaaagagggcaaacacaacctaccctgcccttcttttatccttggcccccgttctttgccaaacagacatctgggttcttcccaacaaccctaggcgagggatgtacttcctgggtcaaggctacccttagttttcatcacatacatcttaagaggttcttcctttctgagctgggatttgtcactcttccacacccacttgtaaagattgggttttgcaccaaaaatgggactgttccttcttcaagttagctcttccttgtcatcttctctctcatcctaacagcagcctgtaccttcccaggagcgctacatttgcccacttgcagcatccctttggctgcacaggtgctccagagaatctccacagtctcctgtcagtctcctctaccttagctgggacatccttactaattgtattagtctcccttcactataatggaatacctgaaatagtgacatagcccattttgttaagataaaaagtttagttaacttttggggnnnnnnnnnnnnnnnnnnnnnnnnnnnnnnnnnnnnnnnnnnnnnnnnnnnnnnnnnnnnnnnnnnnnnnnnnnnnnnnnnnnnnnnnnnnnnnnnnnnnnnnnnnnnnnnnnnnnnnnnnnnnnnnnnnnnnnnnnnnnnnnnnnnnnnnnnnnnnnnnnnnnnnnnnnnnnnnnnnnnnnnnnnnnnnnnnnnnnnnnnnnnnnnnnnnnnnnnnnnnnnnnnnnnnnnnnnnnnnnnnnnnnnnnnnnnnnnnnnnnnnnnnnnnnnnnnnnnnnnnnnnnnnnnnnnnnnnnnnnnnnnnnnnnnnnnnnnnnnnnnnnnnnnnnttgggaacttctgagtgttcttatgccctcaggatgaagtgagacccccgcctcccacaggtctcgagtggtagagtttgccttaggtgaccgcacactgcagccttgctggtgagcacgtggtccctctcactactgagcctgtgcatctctctgctgctgcctcgttcttttcttcctcaccttctctctcaatctggctaaccttaactatcttcacggaccaaattgccttcttctttaccaaccaccccccatgctatagtaggtaccccgtgtggactcctgtatcttgccctgcttcttttgtctgtagcagggagctcattggagcacaattatctcggtgtcaggcagtgactgcagtgtacccactgcaagcccgggcatgaggtgtggtacgccatgcttgctggggtgagtgagtgactgtgtgtatacttatatccacattcggatttctctcagccttctttcaacttactctgcatttatgacatcatttctagtccccttacctcgtatttctttttagtttccgagacagcatcttgcactgtagaccagacatacccagaattcacctttcaatctatgttcaccttgaaaccagaggagtttttctgcctcaatcttcagagtgttaggattgtagatgtgaacaaccatgtccaactctaccttaacagaaactgtgggtgctgtgcctgtgcaccatgtgcatgcagtgcctctggagcccagaagagggcatcagatgccttgaactggagttacaggtggtcatgagcctctttgtgggtgttgggaatggaacctagatgctctgtaagaacagccagtgctctcaacccctgggccatttctctagcccatggccctctctttttattcttttatgctttggataaaagctggatgacgctttttggtttttcatgccaagacttgaaactaagaccccacccgtgttaaacatgcgctctacctccgagtgctgctctcccttccctttaaactagatttgcaaggctggatgctggcatgtcagtgggatcagtttcctcctgttactttcagtgtataagtcattctttggcatgggggaatgaccatttgttagactgagcttattaacccacatggtgttcctaggtcataattactgattcaagccccactgctgaggtctttctaaacagcttggctttctccttctgtaaaatgaggatgattaagctctctgtccgtccactggtagcataagattgatgaagctctgttaaggaatcatattttgtttcttggatgaaagacattttgtaaaggccatgaatcaaagtgttattatttaagcttatgacataatggactatctgtggagagaccacagtggaagctctggttggttgcttgtgtctttacagtaagcagaattatcaaatcgggagtcatttatggaaatacaaagacttaactatttctcagactgtgtgtgtgtgtgtgtgtgtgtgtattaatctgaatttagacaggatctgtgtcctttctctgtaagttaggaataataagcatacatgaaggagtgtagttcttgtggaggcacctcacgaggctacagtgtctgccattgctcagcattcttcaaatgagctgcatgaccaagttagtaattggacaggttctgagacagctgttcacgttttggtatgcactacatctttagttccagtctacaaaattcttgactgttcccctgggctgatcagcctctggagaacgttatcagcctagaatccttaggtgaaggcatagtttagacagttttaaaaagtgtgggaactgaggctcagtagtctgtgttggaccacagcagaattgtaaggagtatttagagagaatgattatcagaaagctagcttgagtctaagatcatattgaagatgccatgtggaatgccagtgtggttcagattaggtcctgagctccgttcctacttgacatattttgctctttatgtcttctcatgttaccactacacctgccacagagtaacagtagccaccatttcttgaacacttagcacttggttgttcgggagcaaggaaggaatagagcatgatagaatgaggtgaggtctgtgttctggagcttccagtctctggtgagagtgtaggggaggaaagagccacactggcaatgagcagatggggagtttatctggcagagagagcatagagtggacagttaaggatagagatggccagcttcacatttcaaagactaggagttggggaggtactgttcttttaaaggttgtttatctatctatctatctatctatctatctatctatctatctatctatctatctatctatacgtccctctattcatccacctatctaccttcctatctgtctatttttggaaggtgtgtccttccgtccatccatccatccatccgcttgtgttctagtgctttaactgcttgtgtgatgtccgtgcaccgtgtacatgcagtgcctacagaggccagaagagggactcagattcccctagaactgatgtttctaatagatgtgaaccaccatgtgggttctgggaacaaaacctgggtcctttgaaagagtatctagtgctcttaatcgctgatccatctttccagcctgtgagatggtattttatatcccttgctactcagtctggtggctgtggaggcttaacctcttgtaagtaaagcttgagaacttcggagctctttcttaagcattttcactaaacaggactaagctatctgcagaaatgtttgcataatgtattatcttctgctattgtaacaaattcctgagctaataaagaagaaaggcttattttggttcacagtatagagtttcagtccacagtttggtctcactgacttctgcctggtgcaacgacagcatttcacagtggcaccatgtgatggaagaagctggtcacttcctggtgagagaggcagagaaaggtaaaatcaaagcaggtagatatttcacagtctctgtggagagcacgccccccacaaacgtaaacatcctactaggctgcactgctcgaagttagtactgtggtcagggcctgtgggattcactctaactaggtagcacatagtcatatatgttccgataacattttaataattactatgtaataatggaagctgagtctcctagggaagcaaaagaaagagagggcagccttggtttattatttgactaataaaactatgcctgtagtgtacatgcagcgctgtttggtaatgtgtcacttgtctggttacctataatacagatatgctgcctattttatagaaagagtaattgactttccaagaggagaggtaatgggtcccaggtcccatagctgctgacaatggttactgtatgtttgtttccaggaagttaagtgcataactcttatctgtagtaagagaccagagcgtaacctgtctatcataagatgtttgaagtgctgtcatctttgctgcctgagaatattcttgaaaaagcatccagtgttttgtgcatcacaagtgtaaagtcacataaagtcattgtggaggtgcttccgcccctctccgtagtctgcttcctaactctggagactccttgggcttctggcctccatggatcctttggcattctaccagttacttaacaacaacaacaaaaccttcttagaaaaggcatgttttagtctggagtattattattattattaattgttagacaagttctcatatagccaggctggcctccaactcctgatgtagctaaggatgaccttgaactgcttgctgtccctcttgttcctcgggattacccatgtgtgccaccacactttacctggaactgaggatcaaccccggggcctggatgtgtgctcagcaagcagtctgccacctaagccacatcctcaccccttggtctggaatttgcagtagtattgagaggtgttggtgaccttgccactgacagtgtcatttctttgcagcttgaagaagtcctcagctgaactgagaaagatactggccaacggccaggtaggtattgttgcatactaaactccagagtagcactgttgctgtctgtccaaagtgtagccatagtgttgaatgatgaagagtctgcacatttcttcttgtcataaatgaatgcctaagcttaatttgattggcagaacaatctgcagcacgtttttcaacctgagctaatgggttccactcccagcagattgaggcgctgtgcacacagccacactgccatttcagtttaaagaagccaatcagcttggaacaagtcgtcatcccgtcggtggctgacagggccctgggtttggaagtgactgtttctttcattatctctgggggcgaaggagaaaactgtgactttccagccttagcttctcttttgtccagagaccagccttggcttttatggggactgaagccagatcggtcagaccgtgacacatgtgtccctgggcttcagggaaccttggtttgacttgtttattgggccatctgaaactgaatgacccaacccagccagggaaggacaaagaggcctgcgagccactgatttttcactaattttgattcaagtaaatggacacttctgaaatagtatagtacttttaaacattcactggtgaatgaagctacctacaggggctgcagttcctcagtagcaacataaatgcgttttcatgtttgttacagtgaagccctttgatagccttccaggcagcggctgtccattgcgatcaagcctgcctattaggctctattgactgagacatctgtgtcactgcaaataaaagactcttattgattttcttaactgctgttcacttccgtccgtgtttcgaaggctgagatcttaattatctcagatgcttattcagtgccttcgcatgctgacctctccaagcctcgttggcatttcatgaatcaaagacttgtagtgcagcatgtcaagaggacaaagaggggtcctcacgcgtgtcctttaatagcacctgtaacattgcacctaatagacgtgcgccctaaaacaggactcgcggaagaacttctggaagcatggcacacaatcttttgaagagttacaaaaaattgagttgatctggttctgacagtctgtcagtcagtgtgtgtgagctctagttcttaaatgttccacgtacagtggaagagaatctggcatggtgttgattgtgtgtctaattctggtagtctcaaattctgcgataggctgtgcttgctagggatcaaacccagctcctccaacattttgagccggtgctatatcgtcagcctccaactgttagatagcatttaccgacacctgttaccttgaagcaccaaaggtgtgcttaggctgaggtctggctggctcccctgtgcctggttcacactggcagcagtgtgaacaaaagctgggacactgagccaggccgtgtgcagacacatgttcagcctgcttgcattctagttactaattacagtttatggacaagtcacttgggtttctcagctgtaaaatatatttcaaaatagacataaattaagaagttttaactacattattcaacctaggcagtggagaataagtagcctgtcatacagtcttctttcctaaatgaaaaacacttcatgttcactgtgcgcacgcatgcacacaagcacgcacgcaccacatcagcattctgaaatagagccccacaaatatcagagtagtgttatgagggtctctgtagtggagattggcacagcaatggttttgacacttaactattgtttattgctttctcttggggatgtgctaaccccatagtaaacaatgtgacagattttttttctttttaaaagaaagcttatcttgtgtttacttttgctcaaaaataaatcagtaaaataaataaataaataaataaagatgagagacaaggaagggtattgctccctcttaagctttcagaacacctgcttgtcctcggccctcccttggtgctgtggagtaactaagcaagggtgagattgcattgcagtgaagtaccgagggtggcgtgggcatcagtaaatctcacggatgaacactgacaccgtttgctatggaaggtgtaagtcacatttaacgatacttgaacacttgaatgtagttttattttagtggtttaactctcaagcattaataatgatttgccttcccactagcctccacttagatttcataaggaattcatattaatcattaacagaaagggacatgattcttcaagataatcaaatattgacaggttagaaatagctttctgcctgggttcattgatataggttatgtgatataaatatttatttcttttctgtcactcagagtaaatgccaccaattgattcagcattgatagagtgtcaacagttcataagaaacatttgactggcttgtgttttccgattagtctctgctctataaagtgggatttactaaatctccccaattgtctgctcatggagtgtgacgccttctgaaaccattattgcttcgatttgtgaagcaaacgtctcatgctaggactcagttctgtcaggcttttacatataagataggattcattgagcatttttattttaatgatttataagcgatgcatacttattctctttaacacagacagacaataaacaaagaacatattctttgctagtccataattaaattccatttggctgtctccattaatttcattaatatgttaaatcaagaaccacttaaaagttttcctttagtctttggtacagagctgttcttttcttggtagtgctctttggtgggagattccagttctcccgcttaataaataaatcaaaagctatttgggccctgtctttctgagacctctgactcagactcactgcagtatttttagagtatgttttccccgctcagagtccagtgtggcggcgctgtctgtctaatgttgggcctgggtttcaaattgccttggaaagaacccagagggtcaattcagagaattttataaaagagccagtagtcactccacagacctatggcttttacctcagtgtctctaaagtggtttctcttcaggttaacactctgagaagtcatactggccagtccctttcctaccacaccttcgttgtgtctagaccttcagatgcctttagaaaactcctgggagtaacctgggagggtaggaatctgctgtaaaaactatctttaaaaacccagtcagccccagcatagtgcactcttctccattgtgaagcctgaggcagaaatgaagctccaagtgagtcagaactgcagagtccctctttctgtccagacacagccaggcctcagtgctggctgctggccctgctgctttctcggccctgctgctttctcagccctgcttctcttttaagcagaatggaggagtcaccagtcattcctgtttgtggctatgtagtgactgtgactcctgggctcgctcttcctcttccctcatgtctgttattttactactgctttgcattttacagttaaaaccaagaaaatcaattataattaaaaactagcatcttcttcgagttaataaaaaccaatctcacatctgtacagtttgaaaaccatgtgaggtatgtgtgaagagaaatgcatgcatgtacatgcatggcattgtgcatacacatagaagtcaaagatcggctgaactgtccccctctattgctgaccactttattttttgagacagggtctctccctgaaccgaaggtttgctgttttggttagtttgcttgctagcaaactctgaagatgatctccctttgcctcctggccctgagggcacaggtgtgtacctcggtgccccactttatatggatgctgaagatatgaacacaagtccacatgcttacatggcaggcgttttgccaaccagccatttctctagtacttgagctacacgttttgtttttaaattttccttccttagaaataaatgaaatttcctttgaaaattgcctttcggtcagtggtttgcctgtctctgcacaatgactgttggcagtcaatgtccccacactgcaccagagacagagtgttgatgttgaactagagtactgattgacaagttataaagtgacttgggttcaatggcctaaaatgctatagaactaagcttttatgatacttggtcctaactaccctagtcacatgaatccctctgtaggcttaggaatcctgcctccattnnnnnnnnnnnnnnnnnnnnnnnnnnnnnnnnnnnnnnnnnnnnnnnnnnnnnnnnnnnnnnnnnnnnnnnnnnnnnnnnnnnnnnnnnnnnnnnnnnnnnnnnnnnnnnnnnnnnnnnnnnnnnnnnnnnnnnnnnnnnnnnnnnnnnnnnnnnnnnnnnnnnnnnnnnnnnnnnnnnnnnnnnnnnnnnnnnnnnnnnnnnnnnnnnnnnnnnnnnnnnnnnnnnnnnnnnnnnnnnnnnnnnnnnnnnnnnnnnnnnnnnnnnnnnnnnnnnnnnnnnnnnnnnnnnnnnnnnnnnnnnnnnnnnnnnnnnnnnnnnnnnnnnnnnnnnnnnnnnnnnnnnnnnnnnnnnnnnnnnnnnnnnnnnnnnnnnnnnnnnnnnnnnnnnnnnnnnnnnnnnnnnnnnnnnnnnnnnnnnnnnnnnnnnnnnnnnnnnnnnnnnnnnnnnnnnnnnnnnnnnnnnnnnnnnnnnnnnnnnnnnnnnnnnnnnnnnnnnnnnnnnnnnnnnnnnnnnnnnnnnnnnnnnnnnnnnnnnnnnnnnnnnnnnnnnnnnnnnnnnnnnnnnnnnnnnnnnnnctcagaaatccacctgcctctgcctcctgagtgcggggattaaaggcgtgcaccacccatgcccggtggtattatttatttgggtattactatatagccttggatagcctctaagtcattatgtagacaaggctggcctcaaactcacagtgatccccctgccttttcctccctactcctagtactaaaggagtgccccgccatgcctggcagttttatttatctgactttgtgggtatggctgcatgtctgtatgtacaccatttgcatgcagtccctacagagaccagaaaagagagcatcaggttcttctggacctggaggaacaggtgatcatgggcctcccagtgtgggttttaggaatagaacccatgtcctctgtaagagcagcaagtgttcttaaccactgagccatctctccagccattggtgttttatatttaatattataaaaagaaaaaagaaaaaaaaagaaataccatcaattcattttctgggcaaagacttgtataccttgaaacagcatacatcgtttcatatggatgtcgtcttttaaagaaacacactcttagagcctgtaattcagaaccacctctgtgtttatggtcttgcatagtcttcctcattgtctgggggattccttagtttcatcttaatctttagcactcactcatatacacatgcagcatcaggcttcgcctcccttgacttcccacccacctccctcatgagcctctaagcccctcccctataatatgaccccatttccctaatgaggctgacatgcatgatactggccactcctcttttgtgagtactgctgtgattataaatggtcagagacacccataccttgtcctttgcctatggggaggacctgatcacaactgttagcccagaggctctgtgttataggcctacttcccaactgcccttttatctcagtgctgcaaattcagaatttgtggacttgaccaggtggaattcctctctcctagagatttacttcaagccacagtgagaatgtatcttgttaggcaagttaatggcgcaaattagtttgttggaggcatgtttagattacctagaggaatgctctcagggaattggcttggtggcgggctgtacctgccagtagacactgctgtttatgaacccttcatcaatcagagtgaagcaagcagcaggcctgctggcatagcatctcagctcacttcctgggctgctgttgctaatgctgttggaaaaggtgccatttaagtccagagtaatgtggctttctttccttcatgccacatcttttctacagggtaaaatatcattttattatattagtagtttaaaggtcacggagaacaaagttttcctcaaatagtgaagcagttggcaattgttctgacttgtctgccagcatttttccactgaccttaaatattgcaattagctgattgtaaattgcatcaatcaggtagtacaacaattaaatctggtgctgaattgacccttacacaggagtctgtcgatactcttttaggaactggcaaaatggcttggcaaggaagctgtcgcttttgcttgcaccacacacttaattatcacagtcctctgaagcttcaactgcagaaatgcatagaagaaaactatttcccttgataaatgtagctcttgctttattcagttggtgggagtttagaacagagcagatatttaaagctttaccataataatggtccaaaagcaaactattattttccaagtgatattgaattaaggactccatccattttctgcccaatgcaaggtagtgcaattccctagaaattgatttttttcagggcttcctttccctgagccttagatatgtggaaaagaatacctttattaaacctacttggtgaataaagttggcagttaatttttatgcaactgtaccagtgcctaaagaattactgaatatatcaaatggagtcagattagccttaaaatcatttgataaatgattatttagggagtaccttaaagacttaaaaacattactttgtgggtgcttacacaacttacctgccagatacaattacaaagaagagtggtgttgttggtataagttttgtagaattagaaaacatgatgtcttgtacattaagttacaggagtagcattagttgatattacacacatgctcagtgtgttctctgtaggcctgtgatctgtcatttaccagcataatatgacttctattcagcttttgctatgcactaatttatcctttgcaaagaaaagctctttctactctaaaaaaattataaacattatttagttagtttgttcaatgttaattatagggtcaccagaggagtttttggggannnnnnnnnnnnnnnnnnnnnnnnnnnnnnnnnnnnncacacacagacacacacacacagacacacacacacagacacacacacacagacacacacacacacacacacacacacacacacacacacacacacacacacacacacacacgttagttctgcgccatgctggagaccgctctcctatcagtatctctgacctgacccttctgagctatgttatatcattccattttgacaccttttatcaaactttaatgaaatgacccaggcaaacaaattgtcattaaactttccatcactttgtcccttggtatcgtcttttataaattggacagcaaatgttgtattgatcctctcgttcttgcagctgaacttggaatgacccagcctgcttgttgtttatggcccagagttgctttccttgacatttccatccgcagcatgacaccctttttgtttttctttctttcctgtggagatgaatgaacaagacatacggtatcgagacacccttggtcatggcaacggaggcacagtctacaagtgagtagtcattctgtctaaacttgctgtttacttcgccaagtggtggggacccagggccctcatagcagaggtttacatagcaccaccgcttaggttttatttccacatttgacactggaattctgcaagacagcttcaattttctcgggaattgcctgaaaatgcatttatattgcctttttaatatttctgagtctgcatctctcctgggtgggtggtggctagtccccattagcaggtgtgcctgaagtttaacgtgtgctcgcctttgctctttaaccatcactgattattagttttggaagcttgttctcaccttgtgctggtccctcgcctgctcacagttatgcccagtggatgccaaactttataagtgccattgctgtgccctgtgctgacactgttattaaaacgcttcttcctgttgtgcttcctgccctctcgtgtccccccacccccaacccgagagagtccctacacacactgatgaatatgttaagtgagaaagctctcccaaattccagttgcggcgatcttaccctaaaggactgttcattttcatattaaaaaatgctaagcataaaaaacagctctctcgacagggaagtccctctcacggcagtgcaaagtttaaactacataatgtaatatgtggcacttaatagtctgcagtggtgtatgaaaaatattccactaggaattaacaaatccatcctctgtaagaaagccctcagggtaacagagctttcttccacacacgccagccccacactgcactgggctgtgctttgaccgtagctactgtaatattaaaaataattggggttataaaagaattaatttgtattctgattggatcctcgtaagcccagcacatccttgtgtactgatgctgccttggcatggaactggacatgggatgaagaagtccataagtcgtctgatctagctatctcctcagcctcagtccccaggcgcagcccggctgcgagtcctccccagaacataggtctttgagaactgaagcgggcctccacatcacgtgcacaccctcaatcccaacactcaggagccagaggcaggtgggggtttgtgagttccaggccagcctggtctatataacaagttcctggaaagccagagatgcagtgaaaccctgcctcaccatcaacaaaaacataacaaacaaaccaacaaaacactctttagttatgttggtcagtcctcaggatgctgggtcaagttgattgtctgaggtcagtgtaaacttaatgatgtgttaatggccagcatatgcaacagtgtgtggccatgactcaaaaaaaaataaaataaaataaaaacaataaaacaaaagcaaaagaaaagaatgtatgctcatcttttagattatttttcctatagacagtttaataagataaattgttggtctgaaattaagtcctgccacaattagaatcagagacaaatttgctttggggctagaattgaacctaggtccgagggttcctggaagctgtatcttcagtacagatgttaagaatttaatcatctaaaaaaaattaatcatctgtataattgttataggaaaataaaaaagaagggactctacagggatgtctaagtaacctgcccacctccccaaaggacactttcaatgtgagattacactactgttgttacaaaaatactttaatcatgatgaaatataaaacgtattatcataaccattttctataatttttttaagacagggcttcactgtgtagccctggctgacctgtatcttgttactcagaccaggccagcctggaactcacagagacccacctgcctcatcctctgagtgctgcgattaagaagagcgtgccccacatgcctggctttgtaagcaatttaatgtgtggtatagtggcttttagtgcacttctattcagcaggtgccggcagcccctctgctatctgtagaactctcctactcaatattctgccaaccctcttacgctacaaaactggactagcaatcctcttattgggacaggcatgtccaaggaatatttcaaataccacagacccttttagctgcatgccactctcagcttctcctaagggttcacttagccaccatcgtctgcacttaccgtgactgtcactgagactgccactgttactgttgggacagcatttgcttctggaaagtgagggcagtgtcttgaaggtaaactactttaattagtagatttctcataagaaacttcagggatcctattgcctacacagttctgttatgtgtattttttgttttgaaactgaatctgaccacattggccatggttctaaattccctggtccaagcaagccttttgccttagcttcctgactgtagatgtgtatcactgcagttggttcatatctagttcttaaggagagtgtgaagtggtccatggttgtgcctcacttctgggttttagtgtgcaatgttcttgtaaccctggctttcagtcctccacagagcagagctacagtcatcaagagctgagagtccactttcctgaagtctttaaggaacactgtgcaatgtgctgtggttgggtttctcttacaccaagtttacttttatagtgtttactataaaaattgtgagggttttttttttttttcagaaaaaaaaatgattatgttaggggctatgctacataaactagatgaagaaaatattggaaaatccactcattggtaacaaaactgcctaatgggtctatttaatttttttccattggaagtataataaagctactaagtgcttatcagaagcccagtgtttcggtcttttcgcttcgcttgctgggacattgtaaatctcaagtgatgtggtgcctcacggagctgcagtgtatctcatttaatagttggcacattttcatcttttcagtctggatactttgctcaactggcagtatgtaaactggctgacatctggacctggtggtagtgtggattccgtgccctgtcctgtctgagccattctctgtgttttcctaagcaggtggttttagttggtatttttttgtattactaatttgaatcataaaagaaattgagatttgaagtatagcctaagtgtagcaagaaaacaagtttgggaaaagaatatgggtttgttttcattactcccttaccccaaggcctgtctctgagaaacagtgtttttacagaaaagacagactttatttcctgattcataatgtacttcaaaaattctgtggctatagcaggcagtatgtgctgtagttaagtatgccccatgtgaatcgacaatctgtatatagtttcctacctcagcctttccctttgtagagtggggaaaataatagtacctatcttttcagattgctgcacatttaaatgagatgatccacagaatgccgagcccttggcttgcaccttccatggtggctgctggtaatgatagtactgacagtggacactacttaaaccctcattttctgcccttgggtggccatggggaaacagctataaaactaatctcagaatcatctttggactcagttagcttagagaggtcttcactatgctgcatgttatattttctctaattaatcctacaaataaaacattattatatcatattctgacactgtgcttttctgaatgcttcacagtatttgccgtgtatcacagtttgttttcaggttgtcccagagtggcttatatagtgtgcacctgttgtgccaatggaagtgagccaagccagagctccagcagcggatccttgtctttcttttttcccttctgtgcttttccctaggcagcactgtttctcaaggtcacaccttgtctcttgtgttcctctgtgtcctagcatcctaggagcagcgttatgaactgagtggctaaagtaagaatgagggcaggagcggcgggggctttcaatcaagttctgtaattgcccccttccctgtctctccagcttcagaggttgcttaatacattcagaacatttgcctagaagggggttcccagaccaaggatatctatgcaatgagtagttctcttgtaggtggtaagactttgatgacatagcatctcctgacctagccaactggtccctgtccccttcctttggatggtgtgtgatgttgaaacctgagtggttagcaggcacagtggctctggacacaccctctgctcccagggccactcagggcctgctttggatggagctgctgagcccaggcttcagaagtgcaggatgcacagtcttggggtcacactgggctgcctgttagctaacagttgcccaagtcaccagaggctcatcatttctgggtttttgtttgtctgttttctaatgcaagctctttaggctaagtcttagattgatcatgagttccagtctttaggtattagacatcagtagtgaattttctattccagctccttcctggggcccagcgtatgggtaaactttttagtgatacaataggtagcatatattccacccagatggtgtttaaaggattgaatatttatcattgtttaagatttttacctagagaaaataagaagaagagtaattctcaaagggttggtttctgctgtttcatttattttaagtggtgttcatgaagccctgggctgggaacagtccttgagggaggaacaaagatcatatgagtttcaaagtcttcttttgcccctgtgatatgactataaaaccaactaaaataaatacgtgcttagaagctgggattctaatagatcattatagtaatgtggtttctttattgaaaaacagaatctctgatgggcagttacataaaatacataagttacctaatttaaatgctgtttagtaggcaaaatacttcaaaaccagaggattcctgaaaacatagcagaactggccttgatggtgagagcgcagtcagtgctgagggcactgtcctgatgggcagcaggcatagacacgagtggtctgtggtgacatcgtagtcatctagagtagtggttctccaccggtgggtcgcgaccccttctggaggccgaatgatcctttcacagagtcagtataatttcatatatcagttatcctacatatcagataacatgattcctaacagtagcaaaattacagataggaagtagcaacaaatataattttgtggttgggtatcaccacaacatgaggaactgtgttaagggtcacagcgttaggaagcttgagaaccagtgctgtagagtgtaagttggaggtatctttcccagtatatgcacaatctattatgtctgtataacgctaaaattgcctgcatgcatccattgttgagtgaggcattgaggttcactctgggcgaattgactattactgaaattatttatttagaaccacgtgacaccccagaagctttgacttccactctcgccagccagcctgcacatgtcagacgaaagcagtgaccctgctctttcatattccccccaacctgtatctcgtatattaaaagtagtttttaaatggtcttgatattgacctgagaggcagggggcttgtttgatttatcttgaccttaaatttccaatgaaatgaagagcgttttctttgcagccaagatcatattttaaacaagcaacaagacatcctcctaatgtaaaattaaatacttacatatggctgggttgcgttatggtatcacttggcaagcagggatattaatgttttcagaaaaatcaatgagtatttgtcaaataaaattaattatgtatgtgtcccctcttccctggcagcccttacggttctgggtttgtttcctgcagtcgtgtgcactgtgctgctgagatgctgaagatcagccctgtacctgggcttctcactctatgccttcccaccgtggccccagccctccctctgtacatgcgcccatatccattatggcaatgatagattattggcatctcaccaacatgacagggtgtcacaggtcgctgagcagagactttcagactgtgtttccactcgaattaactattattgaaatagtttattgagattgaagtattgatcttttcccccctctaaatgtagcttaagggaaggaagaggaggcagtggtgtttttgaaagacactaaatttcatttttaaaaatctcatttatttagccttttctttttcctgttttatagcccctatagttttattgcttggaaaagggtatcttggctttatttttatgacagtataattatacttcagaaatgcacttgattactatgggtaacaaaattgttctactatattggtttggccaatattgctatacaaacaacttttcagtcaattgagcctggtaaaaatcaatacattatggtaatatttcaagtaagaagttgctgaatctaaatgttttaacacattctctttcagggaaaaataattctgagatagcaagactttttgtaatattttatgttaatgaaatgctttgtttatggagaaatttaagtccccagcgagggtgtttatgcgcaggtgcaagctttacgttagcagcatccattagcagacttgggagggatgctgctccataggctgcatcaggtgaaatctgactgtgaatccatcctgtagcttaccctcttggcattcttgaggggatttttttctgccattaacttgacaaagacttgagttcaaaggacaaatgtgggcaggtaatacaggcctggcagtgtgcctctgtagactttcatttgttgacctgcaagttcttagcatgcatggtgtcaagtgccccatgtcctaagagccatgagtcctgtccacaggtgacacaggatctcaggctagactgtgtactctgtgtgggcctccagctgtggggtcatgagagacagaccaggaacagcctcatgaaggatctgaaacttggtagagttggcttttactcagtgtagagaaagtaaatggctccatagaagtgactgttgctgcacctggacagtttgctgtgttctaggctaatcgcttgtctccagtatctctctgagttctattctctccctgatgctctgccatcatgtggtcctttctgcaagctatttgtgtctgggtcatcttatagcagtcctcctcacagtgcttggcatggtgccttgtctatacgaatcaccaagagctttcaaaaccaccctgcagaagcagagccttcacacagtggtaatacaaggtggtgaccatggccgggtgctctaggaccacctattgtaagtagagagataaggccattgcccggaactgctgagaaaaagaactatccctcagacctgaatataagctgactgcatagatccctcctgagtctgagagagctaataaagggcctttaagtgtagtactagcaaccataaatatcttatgccagatccatttggttttgctgttaaattttaccctgggttatgtattcatttattcagggaactagcagttactgcctgtcactgtgtgctaagactattgtaaatacatgcagtcaactagcagacaggacagtcacaaagggtccttgaagaagtaggtgccaaagtaggatgatactcgaccatgcagttgttatgaagaatggacaagtgtgccagagaaagatttaactgaggaaatgttagttgagctgagacctgcagatagtcatgagaaaatcagggcgaagaatcttccagaaaaaaggggccactcaaaccaaagctctgcaatgggcacagagatatcacacctaggccagtgtgattggaacagagaactctctgggagagtggacagatggacaggaactggtcacagcaggtctgtagacctggtgaagaggccgtcatggttccctgctattttacaaacgaggaagagcaaggaggggtaaagtggcatgcccgaggctaagagcacaactcaaggtggctcaccctgggcccatgcctggggtgctgcttcccaagccagttccactctgtgccatttattctctgaattttaaattattaatgcaaatgctttattaatgtaaaatagaaactaatgtacgtcaatggtgaactctgtccagtggttaattttagaagctctttagtttcttggcccacagttacgacagcatgactagctgctggtctaccctttgggtctctttatttatccaaaggcatagaatttagtattgaatccctagattaattatttggttgtacaaatggaggtggcacatttcttgactcctaagacatactaaaattttaagtctattttgcagtagttgacatgttagaaaattatagtctctttgttggcatatcgcacaagtaaatatttgtaaactacagccgtctagggcctttacttaaattgcttttttggaaaataattcactggaaagtcccaaaggcatttactgtgtataactttgggccaccttttccctttcttgtgtttggctattttaatgtaagagaccatgttcctgttacatttctgcttttctggctctgttaaacatcttaacatgggattggaggaatagttactaaagtaggcaggtagcagtagagtctgggttataaatattaagcttaaagtgattttgtttgtttgtttgtttgttttagtattaatttgctttttcggtgcaacttagtataatatcctcctgaccataaaatgtccacggcttgcatgacagccaagtatttggtgtttcactcggagcagagtgcatggttttgttttgtgaattcacataataaaatgaaaacagtgttctgacaaaattagaacttgcttctgggcacaatcaatatagcactttaaccagcttttgtatttaggaaatacaaacatgttcactctcaaataccctgactctgttctagcccgtggccacagagagggtagggtgctcagtgagaaaacggaaaggcttgattaaaccataattaagttttgaaacggttagctaagaactctgaataagatatggttttagatgatttcaacaacaaaaagtatagcaaatgaaaccttatggtgtggtcgcaaatgaagcacaatctcagaatgactaccacaacatgtgcaccgagctaaatttgtatacaccacttatttcttcccttttaactttttaaaaaagataattcttagtgaacgtttgcggagcaaggcatctggggtaactgactgaaagggccaatcagaagtgtctcaacagcttatgaagcacaagcgaaacagtccaagggcctcctaccagcctctgtgcccccagggcccacagttagttacaggactttattgtacttcaccaggatgttggaagtggctgagcactgtaaggctccatcctcatttgattgcagacaagctgcaaccctgaggatgcagagcaactcacctctcaaactcagaccttgttattatttcttagtctcttccaagtgcctttccatttaggagcctcaaataagcagagtaggctgaagggtttgtgccagccttttcacggggcaagcactggagttagttattgctatttttttttttttgacttgggctcatgtttcatactgatggcctatgccaagtagacactgtctgccatcctgcctccttcctggaaaactgagctctttgaaggagcagatggagccagtgtcagacctgttgatgttgacctctgacccctagtcatttcatatggttccttgctaattttatctatagtgggtttttgtggttgtgacttggtgagtatttaatctttctctggaatgatgttagtgttttgggttttctgatctttatgaggcagtttgtccatccccaccacatcaccctttccctccttccacatatctggctttgaaaatgtgtgtggccaagttatgctgtgctttcttaaatggattagagactatgaccttcctttgactgatctctgaggactctgtagagcaaaatgttacctagttcttcaaagagaacattctcacgcaatttatatgttgttagaagtcactaaatatacaataaaaaatatgccatgttctcgaaggacggcaacacagagcccgtgctggggggtgggggagcaccctcatcccttcttgcttgtttgaaggtagtataggtctggtggtagtttgtgttcctttttatattaaagtaacaagtttctcctggtttattttgacctggtcatgatgtgtccattccacaaagtctgttatgcacaaaagtgcacaaaatgaagataaagtgcctcgctccagcctgacaaaagccattcctttgcagagtggtagctgcagtggaagtaaataaatgaatggacagcaatcacagcctagttgatggaactgttcaattaaagcacaggcatttacatggtgtaatttccctaaattgccaatgagcccctttagacacaaccagtgttcaaattgatttcagcattgattttggctgaagctgataaatttctgcttgttagttaaagtaattttgcagaagactttgtactgcggtattgaagtgttcatttagctgatggttaaaagaggagttatttacagaggcctgtactgttgttctgagatgggacaattccccaatcatcttttacttttaattttttaggcttcagtataccaatcaataggtgattgaaactgattaaaacttatccaaccagctgcctatggcagtttaattagaagccggttgattcttaaattaaacgtcttgttttcatcgcattgccatcttccagaagagtgagggctaaccgtgctgaaaacctaaaactgggcttcattaagatagctcatgagtgtgaagctgcccgagaatagctcctcgggcaatccaaaacacacacgggctttcggagagcaatgagggatggttttggttttaggtaagatgtagtccgtagtgtggtacagacaaagggccatctgtttgtgacatgtcaccgcacaacagtgggtgctggggctcaggtttaatacacagtaggcttgaaggggccatcagaatagtcagtgagtctctggctctgacacctcagatggagtatttgctattcagttttgaggtctcaagtaaaataactgtggcagggtagtaaacaaggaccttcacattcgcccatgttgacttcccgcaattgtgagcagggttgcaggacggattttagccatcccccacttccctcgcttccccacactcattttatctagtataagacagttcttgggtttgtaatgaaagcgggttgatatttctgtcataagggacatattgcatctggcactacagggaagggaataaatggctcacttttcagaggtgcatttactctttgacccactagggtactatttagtgttctagaagaggtaatttagtaaattgcaccccagtggcctggaaaagttaatgcaaccctgaaaagtgagccattcgatcgatttctcctattgctttttaaaaatcagcaccaaccatatccagggtgcccgggcgactgttggaaaagtgctctagaagcagccagttcacactcatgtagagcttggtctggcttcagagggcccagatccacttcctactctggtgtttatcaaacagaaatgtgaagcttccattcttgactccttgaccgtagactgactgacgaagacacctccctgacagattttcatgcaatagcaaatagcctctctgtataaaaatatttcctaaccaggtttctctctcgtgctccccactcccagctcctagtgccagcagacctggctgctctcagccttggtcagggaagcttagtttccaagtggacagcagataatggagagatgcatgactgaccagagtcctaagaatgagagactggccgagtgctcagcccagacttggactcctatctctcagaacatgggaggagcgacatgaagtgctggcttctgggcctggcatggccattgtgatcgtcactcacagcagctgtggtcactagcacctgatcaagccagcaaaacctctggcctgaatggggcagggtaggcggtctccaggcatactgaggggctactggcaggagcgtgctgctccttctttttggaggatgtattcaccaataggctttagtggtcggcactgcacccaggcacataaaggcagcaaagttaactggactttgtgggttatttaaaacaaaggacatgaagattaaaggtgggaaatgggagtacatatggtcatactcatatatatgtatgatgttctcaaaacaaggaaaacttgaaagattcttaacacacatgttataaaccatacacagctgatggtttggactctgtaaggaactttgagtcgcttctaacccatactcaaggcatgtccaggagagaggtcccgagctggttaaccctcagctgttcctgtttctcccacttgtattgctcagccactcaacctccttctgggcgtgttgtttctcgcctccctgctttgttcattgccttctctcagaacctttgatcgagagttcactgtgacgggagcttccgctatctcaaaggtatttaggccatatattaaaagacattactctagttaatgtggaaagtgttaaaggctggaaggagctgcttcaacttacagaagaaatatggacgcctaaccacattaacttcacaggaggtatgagaggaagagggggcatctcagccaactaaacagaggagccaacatgaagctgtttcccctttctatgactgggtctttttaacccagccaagttgcccgtgtcttagattgggttgatttatgaggcctatatttggtctggtacataagcagctgcagggtgttgcttaactcctttgacagtcggcagtcaggcttctgtagtggacttctaggcagaaggaaggtcggcctggcccatgatttgaagcttctctacagctgcctttgactttggattttgtgttgtaacagccagcacttggctaatgtgtttatctattatggaaggcaacgactgtcagcgtgcatttccctgacagttggattccttttctctccttgtgaatggctgtggctatttcagtgtgtgacagaactcctcaaacttctccagctgactgttactcccctcttccaaagataagatccaagcattaaggcaacattttcattggctgttcccacgagctgttttgcatatggttgcgggagatgtcattgcaattcaaagatgacttaagagagtacacttaataattgactctgaattggctgcttcttaactttctgtgctgctaagaataaagagtttcctaaataaactggattactaaggaatgcactggtttgtcttcctccaatcaaccgttctgtcaattctcctatgttttctctctgagcttaacttctggcatccagccctgagctagtgtgtgtcctgggaggcgctgggactgaggaaaggaaggcagatattcaggatacgcattgcctgaagaacagagaatctgctttattgttctggagagccgcctctgtctctgcagcctgttaacactgcagctggccttgtaatctgtacatatttttaaataagctttttctctttccagtcccccacctgtctgccctctgagacccaggaagcaaaatgagtaccttctcctgcttcctaacgcttccccatttgcttcctgttctctgccaatggccgggggattttcttggtccaggagaaatttccaccaattgatggctatctctaaataattcacaggatgatcctcctgcttttcactaactctgcaggatgctgtgtgagaagcagaactcctgttggtttatgaaagaagcagccccgccctcacagaacagtgacagtacagtcattcaggtgtctcctgtcactgtgacttggtctatgcatgggattactcttgagggctttctccaagacaggaggaaaaaaatcgatgcagaggtgttttcatgctcatttttgttgaatatttgctgattgattgatgtttatagtgtatgtgagtcatgctcaaatacaacgtgttgttatcaggttgtgggtcaccctgtcttaaacttcctctggtcaccagaggagctagatgctctccagaataaatcatctttgcgtatgagttaaagtaactttattggacttacgttcagaaactcacatgcaggaagtgctgtagaactcagatgtctgctttaattgtgtgagcctgcatgggattgagaaacgcatgttcggcttggggctatttattttgtaactagaaatcagctgggacaactcacatttttgtgattcttgtagaatgtgaaattttaagcataaataatttcagtaaacactgtaagatgggtgcgatgcgcacttgcatggcaggccagatgcaggactgtgaacacaggttgcttctccttctgtcctgggggatgcaggacttttcaacattttgttttcaaacttttcttctcctcacttaaagattattggagaattttaaaaaatatcttttatttgtgtgaatgttttgcctgaatgtgtctctgtgtaccacaagtatgcctggtgtctaaagaggccagaagagggtaccaaattccctgaaactggagttacaggcaattttgagtgtcgggaactgaacctgggtcctctggaagagcaggctgtgcttgcagcctctgggccatctctcctgtctgtggtgattattcttaaggtcgatgattctcattggaacttagatgaaggtcagcccacacattgcttcccttctaagctgcactggactctaaagtctgaaagaacaagcaatagaatcattcacactggtccccaagtattgcctttgtggtcagtcacatttcctgtctacttactaagtccttggcattaggagagacatgacaccagcattcatgggctctagggtctgttgtgagcttaccagaagaaccttctcatgtccttggctactattttcccctccctggcctcagtttagataggaagctgatcacctctcacccctacctctgtacctctcagctcaagtcacccttactccttgctggggacatttctcagctaaccctcagtttcaagctcctcatccagcagctactatgctttcttgaagtcagctttctgtttctatctgtaccttctacaatttggagtaaaggccggagacctgagtgtggcctaagtgacatgacagaactcggcttcccactgcccctttggctcatgtctctcacttaacctgctgttcattgtttcacacacatttccaccctgggccttcacacttgctccactgcttggacaaatgatgtatgaagatgtgagtgaggggtgtctggaattaaggcttttatattgtttagagggggatagaaaacagttaactttatactttgctaagtccactctgatttaaaaaaaaaaaaaaaaaaaaaaaaaaaggtctacctgacaagaatgcagtaggcagagtgaaggagaaaggtaaaaacaaatgaagaaagtgtgggagaaatcccaaatatatcagtagttacaacaaactcaaagaaagattgatgctcaatagatgaattagattgaggttttaaaagtataactgtttgctaatttagaagaaccacaaaaccacaatgatatactaaagtttaaagaaaaagccgggaaacgacatcggacaaaagcagtagtgccaacaaaaccttctctcttaaaagcttgtacattgatgtataacaaacttaaaagaaaaataattagtacgcataaggagggactcctatatgatgctgtaagaaaaacagactgacttagcaacaataagccaatatgtaattaataacataattttaaaatacatggagcaaaatcttatacagttacccagaacatttgataaacccacacagtgggagaatgtctcaacaatcaacaattgatcaatcagataaaattagtctttgaaagatttttaaattttttttattcatgcttattttattcgtgtttaagtgtgactgcttgtctatacaagtactacatgaatgcagttgcctgaggaggccggaagagtgtgtcatcccctggagctggagtggcatgaggttgcaatccacccagtgagggtgctgggaaccgaacccaggacctctggcagagcagggagcactcacccactgaatcctcctgccagcctcatatggaagatcttaacatcacaggcagagtgtgcacctttctacctcaaaagacctggcttaaaagtggatcttcccacttctaatgatttaattaagaaaaaaaataatccctcacaggtttctcatattcaaacattggcatctggctattattccttgtgccatcccagatgtctatgctgtgtgttcagttttgcaggggactagtccccaaaggccaagtggagcacacagggagaagagctaagaaacgcctcatacaaatgcttcctcccgtctctctttggaacaggtaattactgtggcaacaacaaactaatttgaagcgttagctgttaattaaaacattgcagaggtgtgtagttgtcttttggtgtaaccagagcctccattcagcctccattaatcactttacagttaatgtgctgaggaaggtcaagacaattgagaaagaaagtaaacaaactctttctccaggtaggatgctgttcacagagttgaggagttggcttggcttgggctgcttctgcctttgtcatccatttctccctgatgattaaatgtgaaatcggctctgtccccagactgtaaacccagccacaaggcatctttattgcttgaaatgggacccaaacttttcatgggtgaattagcctgcgtcataattaaatcatcaactctcccttttaattcacttggaaatgggagacctttcttttgggaaagagatcagctttcttgacaagctaattaagttgccaaactgcccagtgaggtatatgtatgttgggctctctgctaatcatgcttttattgctgcagctggtctcagaagtccatgtgtcacttatgttcaaagtatgacactgcccttcccacggcttccaatcatttgtctttatactttagtccttgtctcatgttctaatactcagggtttcaaacagttgaaataggaagtatctatggtctactggttgaaataatgttattatttaatcttatccattgaattatttatatttgcatggaaagggcatctaaattcttcacatatattttaaagaacacattccaacaacttctaaagccactggaggaaattggtctctaccagtgtgctgcaaagtttgaatatatcacaaaacaaactatgacctgatgtgtagctttccattaatgtagcttttaataaaagtcatatttacatagatggtaaataataatttcttgtaaaaaccaggataatatatgggctccatttgtaaaatgttgtatccttttatacgaagcctgaaagatttcatttattttttaaaagtgtgtgtgtgtttatttgtgtgtatatatgtatgtatgtaggtgtgtgtatgtgtgtatatatatgtatgtatgtgaatatatgtgtgtgtgtatgttcgtctattcgcccagttttgattgtagattcataactaaaccatttctataaatcagttgatttcaaaacatttgttggtgctagatatggtgtgcatatctccagtcttgttaatatttcttaacctaggttatgacctatttcagtgtagctgggtgtcttaattacttttctaatgctgtggaaagggccaaggcagctttaaaaagaaagtgattttaggcaattaaagtttatgatggtggagcaaaggtatggtggtaggagagcttacttacattctgatctacaagttgggaatagagcaagagagacactgggaatccttaaagccagcccccagtgacacacttcttccaacaaggccatgtcttctaatccttcccaaatagtttcaccaactaaaaacattgaaacatgttagcctaaaggcaggctttgggggaggaggggnnnnnnnnnnnnnnnnnnnntgttgggggaattctcattcaaacaccactcggtgcctaattctctaaggaaaagatgagccacatgctaaaacctcattggtgtatgtcttacatccgtcaatgttttattatagtaaagccgtagtcagagctcatcctggattggtgattattgatgaaatacagtaatatgatttctctttctgtgtaccttaagaaaagcaaaacccttccttttgctgcacatacacaactatagacacacatacagtgatataacagaggatctagggtcagaaaacctgatctagtttgaaggtttagttctgccgctgtgtagttgggcatcgagcaaactgcttaaattcctcatgctgcagagctgtctttaaaggaggataataatagcagtgtgaggtggggttttttttgtttgttttttttgttgttgttttttgttttttgagacaggatatctctgtgtagccctggctgtcctgggactcactctgtagaccaggctggccttgaacttagaaatctgcctgcctctgccttccaagtgctaggatgaaaggcatgtgccaccactgcccagctagcagtgtgacttttgagcagtattttaagattcataatcacttgataaaccttgtttagctccacagaaatagacattgctagcatgggccatttgccttgaaggtctatccccctttgggccagaagtgtttgggttcacaatatgtccttagccactctctaggttatctaatgacagcaagtaactttgtgtctttttctttttcctatagagcacatcatgtcccaagtgggaaaattttagctgtaaaggtaagcattgggtatattttatgcaagtttgtatgtgtgagtctgtgtgtgagtgtgggtgggtggtccatgccgcatatatacatggaaatcagcggaaagtgctgggtggcctgttttttcactctctaccttattcccatgagacacagagtttcttactgagtctggagctaggctgatcctccagtctcctcctcccacagtgctggacttagcgaagcaggcagccatggctggtattggagatgtgtgcatcaggtgctgctgcctgccgggccatctcctcagctctgtgttgtaagattcttggtgctcactgattttctttctcctctcaactatgtcactggtgcacaaccacactttgcagcagtaggctatttgctgaaacgtggccagaccctcttgcagtctggcagtgatctactttacagacacgtgctctgctcctgcctgccagctagtgacttcttgtcatgcctctgggcctttagtaatggaaggttttagtttttgaatagctgctgtgtgccaggtatcacactacatgttttgaacagtcatatttaatccttaaaactatgaggtaattctcaccaattttagatttgaaggaagagggactcctgggggctgatttgtgcaaggtcatttggaagaggcaaggttaggatgttcaccttacctgataaagctaatgtctaccagtgctttgtagcttgtgtacagtgactgctgttcaaccctctcttgtccactcagcctcacagttcatctctgagatgcctttgtaacgccatctacagtgagaaattggtttctttccctaatgtttcagtttgtatttctgtgccttatattttaaagaaattaagaatttgcataatggttgttctttttttattgaagttaaactagaaccgaggctcaaatcttcggaattctagtgcgttccatggtttctttctgatctcagaccgaggccagcaactccatcgtatatggcatcatgaggtctactcttaataacagatagcctgtatgaggaggtctagcagagttctctgaggatgcaaattatatccacacaggtgcagcttgggaggcaccattgggatcctcataggcctcacgttttgtacaggaggaagtgggtccagagagatcctagagtgctcactgtaggactaagctgtattccagtcttccctctgtgaacccaccttgatccatgttctgtgtctctcttgagctccctttgataagagatcacccactaagtgagcagtgttttcctgtctgcccagttatttgttcctttcatgccagaagtcttagattatgatagtgttgatatatttaaaaacactcaaatcttcagttatgccaagagagagagtgtgtgtcactacaaatgaatcatagcccttggccttgcaaatagaacataaaattttcataattccatacattttaagttgtgcttaggataggctaatattaagattcttagccatgattatttaactgggtgtggcaaaggaccagcagctctttctggaaaagagttaaagtttacttgataaaaatagctgttagatttttactacatgagaactggtggggtttacaaataagccattctccagactggacctttaaactgggctttctagcaagaactgtattgtgtcttcaaactgagtcaaatggtggctgatttttgtgtatagacttgatcttgataaccaaaacaaaaatcatgtagatcatacaccagtacaatattggcggaaaagtaccatttcttcaaaacagccagaatggtaaattagttattagaattttattatttagtttttaattatttggaaattttctaagtatttttcagttattgacttctatttaattccactgcagtctaagaacatactatatgattggaattattttaaattaatttggctcaaatatggtctttgttggtgaaattttcctgtgcccataaaataatatataatccaaagatatgaaagtgtggtgtaaaactttgttagataaaattggcttttagtttttatatctttcatatctgattttttttctacatgttccatcaattaccaaacaggaatgttaaaatctccaacacttagaccttggtctggttgttttttttacatttctgtcactctctgtcatcgtttttgaagatgtactgttagttttggtaaggtttttatcatttggaagaattggcctctttatagtaatgtggtgactattttgttcacaacagtctgtgctctgaaatccatagtggttcattattaatctagctacagcagctagctgtttactaatattggccttttactttgaacctagtatgtctctatattggaaatgagtttcttgtagacagtatatagttgggtcttaatttaaactctagtctgatctttgctttttaatttggctgttggaaccatttacattttatgtgatatgatatggttatatctcttgttctgtgtgttgttttccgtttgttctggttgtgtacccattctccctccactgtttctaaggattgtctagagtttatagcgcccatcattagtctatcatataaaatccttacaataagagctgtgctagtcagtgttctattgctgtgaggagacaccagacccaaagcaactcttatcaaaggaagcatttaattggtggcttgcttacagtttccaaaggtttccaaagttctgaaggaacaagtctccacgatcatcacagactgtggggatctagactgtctgggcttttcttctgaattttgaagatctggtttcattgctggctttttattttccagccaggtgctggctgtcctttgtgttcattgctgctccatgcgtctgccctgacatctcagagttctttctttgttacaggtggtggttatagtttacagtatatggttatgctgggcttggctgtgatgcttttttttattattattattcaatatgcttgaggtttgtttgttgaaaatcttgaatatgtgggattttagccttcatcaaatttggagcactttaacctttcatcagatcatgcttccacatgggaactttgcttgccttgttggcttcacttctcagtctttccctgtcttagttttggatagtacctgttccttccatgtcttcacagatcttttctcctctttggctaatgtgccattcctcctacctactgtggtttttcatttataatgttctttttatccctaaaagtgtaggtaggcttttttgctttaagaacaattttcatgttgttatttgatgtgctcaaccttttttctactttctagagtacatataataattattacaactgtgctgggtagttttatgtcatcttgacagaaagaagcttaagtcatccaagaggagggatcttcaactgataaaatgcatccataaaagtgagctgtgggcaactttgtatggcaatttcttaatttatgattaatggggtacagtccagcccactgtgagtggggccatctctggtctggtggtcttgggttctacaaaaaagtaggctgagcaaatcatgggaagcaagtcagtaaggagcaggcccctctatggcctctgcatcagctcctgcctccaggttccttccctgcttgagttactgtcctgttttcctccagtgatatggaggtgtaagccaaagaagccctttcttccccagattgcttttggtcatggtgttttgtgatagcacagtaaccctgaccaggacagacaagccagccagtagacatacctagtagctgtcatgtaccttatttctgggttacttccagtgcatttttttcctcttcattttgggttgtatttcttttttataggacattgataatatagcatgggtaggtagatttgcattcctatattcttaaagtgttctgagatgttagcaactttgaaacaatccaattttttaaagacttacttttgaactttgcttaaagggccaacctagcagtcagcctgcagtgaatttccccattctgctgaggtgggactcttgctctccaatgatggagggaacacaggccgcggggttagggttgcttcctccggttctctcctcctatcctgggtaacctccagcttctacagtgaatcactctactgtagactctgatgtctgtcacactccctctggtgccctgccagctgacactggcacccttggactcttctgccccaggctctgtcttctcagcataaggagactgagttcagcctgctttctctccctgtacagggaccagaagactctgtttagtcagtgaactgagcagcctaagattggtctttatcaccagtctctagatgtagtgttgctctggctactgcccagtacctggagacctattgagggttgtgtgtgtgtgtgtgtgtgtgtgtgtgtgtgtgtgtgtgtgtgttggtttgttgtcttgtgaattttgtttgttattttgttgagacgggactcaccatgtatccctgatttgtgtataactttctgtgtggactgagctggcttcaaattcatagggatctgcctgcctctgctttgtttcctttcctttttgtaagaccgttggccagcttctgaatggttctctcagtaaagacaagctgcaatttactgatgatttatgctgctgtatattatatatatatatatatgcatatatatatatttattttagacttttgctactgctcctgcttttcatttagcagatgcagaacctgagacagcacagttagacaacttacccaagtttctgcacctagaaagctagagaccagcatgtaaaacctgcctttgctcatctatacccctagattagcttcccaaaagcatagttccctcttaaaaaatattaaaaggcccatgtcacttctgtcctggttgcttctgcactggttactattctcacagctatgagaagatgccctacaggagcagataaagggaggacggttctctttgctccacagttgagtgtctagccatcatggcagcaggagtggaagagagatggaaactgccattctcttccttttctctcttatatttggttcaggaccccagccctggagtgatgatgcctactgtagggtgggtcctgccaactcagttaacccagtctgacgccctcacagatacaccaaaggtttatgtcctgggtgattctggacctgtgagattagcaatcaccatcaagcgtcacatggcccagacaaactaaacacactccacaatgcattagcagtctgctgctgcttctgtagcatgttcttacatttcctggtctctgtgcactttgttctgttttacttgaacttgtcaccttgtctgaacctggtttgttgttggaattttttttttcaacaagttaattcatgtgcacctctctaattagaatgccttcatctgtgtcttcaactgttagaatcttagcagccttcaagggcctgctctttggttctggataagccctgtcgcatgtgttgtatgtgccagtcacctcttgggattctctgcatgtgattcctaaaggcagtcatgtgccatcttgcacatagctgttagtttcatgtccatttcctctaacgtatcaaaatctctttaaaacggagaacagaactgaccactttcttgccttacctacagtgcccaacgctaaatgcagtgtcttaatacataatttactgattgaaaacagttttgttgttgttgtttaattcattcatttatcttttgaagtaacattctgaaaataggtttaacagcatacaaaattcccttaatggcctttgtatggaccgttacttgcccccggaatatttctttgcttcctttgttattttaaagggtgaaatggaaggttaagactcagaagtgcatttgatcttttcctgaccctctcttgacttttgtgtgacttgaagcatgtcacttgaacctctcagtgaccccagttgcctggtgtcacagggggaccgtgcagagcagcaaatcttagtccttgtctgagcagattcacctgcagggccctgctgccagcctagagccaagggggatctcattctgcaaggcagtggtctattggaccacactgaggctgtctgggggccggtttggtgagagccctactcatagctttcccaatttttatacattcccgactgaggcctctttttcacagacaaacaacacattgctgctcttcttttctctgatctgagatacgataagagaactttacaagtttttgtttttaaaaggaagatcattttaggaaaaatagaaatgtgtctataccatgcaatctagaaaattttctgcttcacacagcacatttagaaaattatgctaaccacatgttagatactgtctgataatcacctgcacacttgctagctcggatttgaccagcttttgtttgtttggtataggtagcaagaccattgcaaataagtagagcagaaaacaaacacaaatactgctagccatctagaagcagaacctctctcttccattactgcctctgtaaaatctttccagtagtaaagctcagggaatttactggactccccaggattgttttctgattggaaaagaatccatctagcgggatttcttagctgtgtatgtagcatgcattgagtatcattcctggagtgctttggatttctgcagcttttaaagcagcatttaaatggaccatttgattaatcatttgtatcctggctgtaatcctcccaaatttcctttctgagttgtacatactgtaaaagacaattatgtctccacagattaaataagtgaattaaaacagaatagtggcttaatttgacctgtgattttgttctccttgcctttagtagagcgcatgccactccagcaaataaatgaagtcatccatgacagctcgtgatgaattgccgtatttatactgtatattttaatagtctcacactaatttaaattgagcacagagtaaattataattcagtcacttgactgcttgtatttaacttgacagcgcatccttgcgcgtcctgtccgggagatgtagcagagagagagagagcggtgagaatgcaggcagggacctccatcctggctgaacccttcctcccagagctgcttccagctccttctcttcattccctcttaagcacttggctcagcctgaggagagaagattcaggcagtccacactgtgctggagcttcaaagggaaaaatccacactcgctgtaattttctccctagctttcagaggaagaattggtctggtttatttttagcatttttaaagctcactggcaggaatgcccgggggaagggagtttacctctcacgaaatgccaagctcccagaaaacagagctcgtgcacatgcgctgtgacagcatggagtggtcttcctctctggaatttgtagaaatgacctgatttgcttttcgggggttatggactcccagtgctctggactacagcaagtctcgagagatccaaaccaatcagaccagtgggtgagcctcacgaattcatcagtcctagtcgagttttggttagtgtggcactttggtttgttttggtgtttgcatctttggtttttggtttagtggcagacatcacacgatccatttcccttggataacagcacatctggaatactgcttgtaaggaacactttaatcaggtccatctcagtgactgggtgctgctctgaggctttgtcctgggtgctaaggagtcatggctactcaaaccctgccttgccctggccattctggcagcttttaggagatgctggggcattaaagccagttgtggtaaagatgaataagggtcaagtcagagatgaattctgaggtaggtgtctggaggtggtgaagcattcaagctgggtctaaaaggtcaaaccagctttcataatcagtgactgtggagtggaaggaggaaacatgtgcacggccgctagggtgggccggaaggcagctgtgtaggaaggatgagaggagggttagcaggaactccagagttgcagcttactccacatcatgggaactcaagcaaggttcttgttcaagggacagataaggtctcggaaattgccatcaactccaaagcgttggctagccatgtgcagccttagccttacttcttacttacgtgactgctaccattagaaagagggatattagaatagtcattttctttccttgtggtttacataactcccgttttttgctttattcagtataatgatacatggtccccgtctgagatcggaactgtaactcagcactgtaaggtgtggattgactgctgtagcagtcctgacggttaggctttactcagaagtgtttacaatcaaactctgctacagttcttaaggattcttctccacctattttatgttcttactgccttttacaaatatattttttaaaggttttttaaaacgtggtttcactgaagtacttagtcgttgagccggatggggttctgactctttggtagggtactcttggtacctgcactcgtgagaaggttccagatcagtccccagtgcacacagctgcctaagggaagcggaaagtctttgaattaaactcgagcctgccctgggcaagagcgttaagttcatatacttggacatttctgtgttataaaatccaccttggtggcagatacttaaggaaaaccacaacccgtcaggaggtcctggctaagcgtgggagtcaggtgacgtgaggacctctccagctctcaagtctgtcagcatttataaagaaacattacccacatgggaggaagtaaggtgacagggtttttaaactcccatttcttttatttctgaaaatcccattttaaaatgttcttttatttaccatcccctctgcttatctccgagtgcctgctcacagggctctgctcttttaatgatcttcttctgaaaatagccggtgtggctcaaatagggcacataaattgagtgttataacttaactgacttttaaagccattaatgctgacctctgagacctggctccttccagggttccatcaatcacctctgtaccgcctcctccagcgcagaggcttagcttcagagacagctttttttttttttttttttttttggtgctggggttatggggatgctgcataaagaaagcacggtatttctttagttcttgtatctcacgtgctatgtaacttaaggtagacgaatgtgttgacgctgctgtgtctcttcaggttattctgttagacattacactggagcttcagaagcagatcatgtctgagctggaaatcctttataaggtatttttttcttggtcacttttatctatgtaaatgcacatggtgtcagcatctaggtgttaaactacttttgtcttatttttgttacagtgtgactcatcgtatatcataggattttacggggcatttttcgtagaaaacaggatttcaatttgtacagaattcatggatggtgagttgttccctttaaactacattaaaaatgattttttgaatcgattgacgtaaatgtagtcttgacacagatgtccattccactttggagtgagtggcatgtgttaacaactgccttctttacactggcagttctcttctgttagggttcctgctattagatatttgtagcttgagtgtaataacaagaatgcaagttaatctccttttactaaaaatttgcactcgggtccagtcggcgcgaggtccctgctgcctctgtgcagcctgcctttgctgggaacagatgctctgttcttttaatgtttcagtcaccaaaacagattttcttctaaagaaatctattaacccaatgtcctgtgtctttcagaaagaaataggttcttaattgctagacaagaaattgtttttcaacacagctgtttagccgagctgcgtttggctctgtttggacgtcaggcctgtcctcctctgcttctcattcatggccatcagcagcactcccttgatctgaatattgtgacaggatatagagctctggaaatcctctcactgaaatgtcattgttactctttttttaatgtattgtaaatttggacacgttcccaccttttacaaggtcagtttcagtatctagcctccattaaaatgtagcatatgtgcctttctactttcttaggtacatgcacacacaaaacagacataccatacacatacatacataccacacatgtgcaccactcacacaagaaatataccaccatacatacatacacacactacacatacatacatacatacatacatacatacacaaatgcatacacgtttttacttctttatgtatacacaccatgcagccacatatacacacacaccacacatattctacacaatacactccccacacacatcacacatatacataccatacacatgcatcatctatatacactacacacatgcacactcacacataggcacacctttcaacttctttaggtaaacacatatataccacacacataaacatacacagttacaccatacatatacacacaccataaacacacacaggtacacacacacaaacacatacccttgataaccacataggtagtgtaatggacaccggttaggaagcatgggtttgtaatcccagtacagctcactcttgtgaacgtgcatcctttgagatctgtataacttcagttacattaaaacactttttattaagatagaattaagatactataaaactcacccttttgaagcatacaacttaccattgttgtctaatttcaaaacatttctaaagagaaatccctagccacattaagtgacttaatctcatccccctccctctacccgctggcagtcattggtttcctctctggatgtcatgctgcacatcagtggagtcctgtagtcgacagcctttgtgcctggtggctcatgctcagaacagtttccaagttcatgcgtaaccgcagcagtagcacccaccacccctcacgtcactagcagtagtttattgagtggctatacaacatttgcttgtttttcttcagttgatggtcacttgggaaatttccacttcttccttttacatctaaaagatgtttaattttattgtgtgtatatgaatgcatgcacacataggtgtgcatgtgtgctactgcctgcctggaaggccagaggacagctttaggagttgactctccttccaccaagtgcccccagggatcaattcaggtgatccagttcgctgggagtgaggtgtcaggtgatccagctcgctgggagtgaggtgtcaggtgatccagctcgctgggagtgaggtgtcaggtcctgtggcaactcttaatttttgaggaagtgtcaatctgttctagtctgtcagtgctcaaatcatttgcagttactgtaagtactaaagaaatactgcaacgcaacgagaaaaacaccagtcactctttaaaaaaaaaacagacaatagattggttatgaatttctcaaagaaagacacaatggtcaacagccacatgaaaatacttatcaacagtggttgtcaaggaaacctaaatcaaaaacacatacatattcatacctgagaccacatacacacaaaacaaaatcaaccacataataagtgtagacaaaggcacagagaagttagaatcctcagacaatgttggtgtgaaactgaaatggtgtaaaatagattagaacagcctgacacttcttcacaatttccacagaaccaagtgagtccactgctacagaaacccaagacaactggctagcacatgcacattgtagcctgctgctgtgtttatagcagctcacaagtgaccaagatggctcagtaaatagaggggcttgctctttatagcatctttcttctgccttcttagggtattggtccctgtgccagtttcagtacactacat

SEQ ID NO: 248 - DNA, 2259 bp, Mus musculus
ccacctccgctgccgggacgcgggcctcagtcggacgatcctgcacgcgccgcgccctccggttccggctgcggtccgggacccgccccttgaccccgcggccctgggcccccctgcctggttggagggcaggcgccaccggtgcacctccgaaacagccccgacccagcccgcggcgcccggccaccgtccccttgcccaccgagacactcaggacggcaggaccctggccactgtacctgccttaaaccaggccgttgctccgctgtctcctcttactcacaaggactacagaatgcttgtgggttctgttttgtccacttttgtaactccaggaccttccgctctctactaattcctcttggccggtcccccaacagtgcatcctctcctagggacactccacacgacctgggcctggttttgggcctgcaagctccctcctgatcgctcctcttcacttctccccatcttcttgctccctatttatcgcctgccttctgtctatcgttccccttgtcacttcttggggctcctcctaagtaggggcaggtcggtaccccttcgccccaggatgtgagaccctttaacctgtaatgctgtggctggcccttggccccttctgtgccatggagaaccaggtgctggtgattcggatcaagattccaaatagtggcgcggtggactggaccgtgcactccgggccgcagttactcttcagggatgttctggatgtgataggccaggttctgcctgaagcgacgacgacagcgtttgaatatgaagatgaagatggtgataggattacagtaagaagcgatgaagagatgaaggcaatgctgtcctactattattccacagtaatggaacagcaagtaaatggccagctaatagagccgctgcagatatttccaagagcctgcaagcctcccggggaacggaacatacatggcctgaaggtgaatacacgggctgggccatctcaacacaccagccctgtggtctcagattcgcttccaagcaatagcttgaagaagtcctcagctgaactgagaaagatactggccaacggccagatgaatgaacaagacatacggtatcgagacacccttggtcatggcaacggaggcacagtctacaaagcacatcatgtcccaagtgggaaaattttagctgtaaaggttattctgttagacattacactggagcttcagaagcagatcatgtctgagctggaaatcctttataagtgtgactcatcgtatatcataggattttacggggcatttttcgtagaaaacaggatttcaatttgtacagaattcatggatggggggtctttggatgtatataggaaaattccagagcacgtccttggaagaattgcagttgcagttgttaaaggccttacctatctgtggagtttaaagattttacacagagatgtgaagccctccaacatgcttgtaaacacaggcggacaggtcaagctgtgtgactttggcgtgagcacacagctggtgaattctatagccaagacgtatgttggaacaaatgcttacatggcaccagaaagaatttcaggagagcagtatgggatccattctgacgtgtggagcttaggaatctctttcatggagcttgctcttgggaggtttccatatcctcagattcagaaaaaccagggatctttaatgcctctccagcttctgcagtgcattgttgatgaggattcgccggtccttccgcttggagagttctcggagccgtttgtacatttcatcactcagtgcatgaggaagcagcccaaggagagaccggcgcctgaggagctgatgggtcacccattcatcgtgcagttcaatgatggaaactccactgtggtgtccatgtgggtgtgccgagctctagaggagaggcggagccagcagggacccccgtgagacctcagcaggacactgaccactgaggaccagtcatcatgacacagcaagccgtgacccctctgtctgctgtactggcccagcctcctgctcgcacctcctgccctacctaggaagccctccagagggccagcctctgctgagcgggggaagtgggcactgactacagcaggtggagatggtgcagggcggggtgatgaggttataaaactatggaacctcctctggccccacccccttatctttccctactgttcattgtaaagggtcaggccctatcagcagcactgatgggaataaaagtattattgctttg

SEQ ID NO: 249 - DNA, 1347 bp, Mus musculus
atgctgtggctggcccttggccccttctgtgccatggagaaccaggtgctggtgattcggatcaagattccaaatagtggcgcggtggactggaccgtgcactccgggccgcagttactcttcagggatgttctggatgtgataggccaggttctgcctgaagcgacgacgacagcgtttgaatatgaagatgaagatggtgataggattacagtaagaagcgatgaagagatgaaggcaatgctgtcctactattattccacagtaatggaacagcaagtaaatggccagctaatagagccgctgcagatatttccaagagcctgcaagcctcccggggaacggaacatacatggcctgaaggtgaatacacgggctgggccatctcaacacaccagccctgtggtctcagattcgcttccaagcaatagcttgaagaagtcctcagctgaactgagaaagatactggccaacggccagatgaatgaacaagacatacggtatcgagacacccttggtcatggcaacggaggcacagtctacaaagcacatcatgtcccaagtgggaaaattttagctgtaaaggttattctgttagacattacactggagcttcagaagcagatcatgtctgagctggaaatcctttataagtgtgactcatcgtatatcataggattttacggggcatttttcgtagaaaacaggatttcaatttgtacagaattcatggatggggggtctttggatgtatataggaaaattccagagcacgtccttggaagaattgcagttgcagttgttaaaggccttacctatctgtggagtttaaagattttacacagagatgtgaagccctccaacatgcttgtaaacacaggcggacaggtcaagctgtgtgactttggcgtgagcacacagctggtgaattctatagccaagacgtatgttggaacaaatgcttacatggcaccagaaagaatttcaggagagcagtatgggatccattctgacgtgtggagcttaggaatctctttcatggagcttgctcttgggaggtttccatatcctcagattcagaaaaaccagggatctttaatgcctctccagcttctgcagtgcattgttgatgaggattcgccggtccttccgcttggagagttctcggagccgtttgtacatttcatcactcagtgcatgaggaagcagcccaaggagagaccggcgcctgaggagctgatgggtcacccattcatcgtgcagttcaatgatggaaactccactgtggtgtccatgtgggtgtgccgagctctagaggagaggcggagccagcagggacccccgtga

SEQ ID NO: 250 - DNA, 96587 bp, Homo sapiens
  misc_feature (9475)..(9958): "n" at positions 9475 through 9958 can be any base.
  misc_feature (58300)..(58319): "n" at positions 58300 through 58319 can be any base.
  misc_feature (91094)..(91113): "n" at positions 91094 through 91113 can be any base.
ccattatattattaatttatcttcgatgatatttatagtatcaatttaaaagctgtaaaacttcatgaaaagtagcttaaacaaggattttgataaacaaaagctttcagttttaaaagcaaatcatggaaacaacttcttaaagaagatttgaagtttttgttgttgctgttgatagaattatgaaccttataaactcagtattttttagttaacctaaatacataaatctatttgaattcatcttatgaaaagagatatgtcactagatatatgatcattatatgctttagtgattcatggaccttgttacatccatgctttgtaatgtatgaattatttagcaagaaaaatcacaataattttgttgttactcaaaaatttatgggttagcagaaacaattacgcagcccctgaagctggtatgttaaggtaacatcattaacactacgtagtataatttttttagtacttatttgacataacctttactgcttctgcaagaatatatcagtaattttataacaatctgtctgtaaacagaacattgaatttattaaccacaaagtgattcattttactctattttcatattagttcataatttaaaatcagacttaaaaagttgtctactcaaaccctaacggaagaataaaaatatacaaaataaaaaattaatactctagcaaatagatataaatgtaaaactccacttaaagtggatatttttatttcagaagatatagatgtgtaagaacgagatgaaaatagatacctttgttacctttttacacattgtatcaagacccttgctatgagatgaccaccaaaattttagtttcttatgttttcaaatctctaaatttacaaaatgaaggaagcaagaatttgaaagtttgaataaaaatctagtgtcacttaattttagatcacatttcaaaatcaacagtcatttattcatccaagaaatacttttgccttgacggtgttgaaggcacttgtcaatgttcccttgacagtgtggaaatcctagtaactttccctgccaacaaaatctagcagttctaaatctatttacagagtccattcaagccatactgaaaagactgctgtccacaactgggtgagaaccatgtgttatgaagttttctttccagcacttgtcatataataaaggctcaatgtttaataaatatgtgatgattcaaaattaaaaggaaaacttgcctttgtttttaatagctttttaaaaaacaggatactttaattggagatcatatggattctttacaagaacagcaataagttttgaaatattatctcagatgtaatgaattaactatgtatgctgaaagataagagattgtaatcttgttgaatttccttttgaggtatttcaaatggtgccacctgttttctcatacaataattttgctattttaaaatcaaatttagaatgatgtgtagaagtaaatgaagtgaaacatgaaacagaaagtcctagaatcagttagacttactcttttaaaacagaactagaagtaatgtgttagtaactagaagacaaaaagagtgttttaatcctcagaaaatggaatgggttacctcctgagacagtgagtcttctgttgttggagctgttcagaagctacatgtcaattccttagtgagatgggtagggggcgggtaaaattcttgaatgggaaggggattagattggtgattttttaagtcccctttaactcagaaattttataatcattgctgcatgtctatgtctggttcccaaccatgctatttagtttggtacttaccgcttttccagtatatgtggaatacaaagaaccctgctttgaagagaaaagatatggtttcagttcttgctctaccactgctggtagagtaactttgagaaaacttagagctttctaagtcttaatgtcttcatatatacaataagaaatgtatctaacacttacacagcatttacttgtgccaggtcctcatctaaggacctggcacatatgaactcacttaatcctctcataacgaccccatgaattaggtacggtttttatgtttatttttcagttgtggaaaccaaagggtcttgcccaaggccacgcatggtaagtgttcttcccatctgtctacagagtccacattctcagcctctcctctacacttgtcgtaagatgcacaagataattttgtcagacaatggatgcggaagtgctttgttattatgattaggactacatataaagaaagtaatatagataagtttaaacaacaagaagagagaaaaaataaagtttaagtgatttgtaggaacaccagtctactctactgaaagaaaaacgtgcggccgggcgcagtggctcacgcctgtaatcccaacactttgggaggccgaggtgggcggattacgaggttaggagatcgagaccatcctggctaacacggtgaaaccccgtctctactaaaaaatacaaaaaaattagctgggcatggtggtgacgggcgcctgtagtcccagctacttgggaggctgaggcaggagaatggcgtgaacccgggaggcagagcttgcagtgagcctagatcccgccactgcacgccagcctgggcgacagagcaagactccatctcaaaaaaaaaaaaaagaagaagaagaaagaaaaatgtgttatgtagaaattatgtctaataaaattttaaattaataaattaattcattttagagtatttaaaatccataggcttagcatatagtggtggtccatgaatgacctgtggaactgtaatttctgcctctgtgtgagtgtactttcatttccattcctgccgaaacagaacagggcaactctcctgttacacttttgggagtttgtgttcattttttgtctgtctcttcatagcctttaaaaaaaattaaaagggctgggggcagtggctgactcctgtaatcccagcactttgggaggccgaggcaggcagatcacttgaagtcaggagttccagaccagcctggccaatatggtaaaaacccatctctactaaaaatacaaaaattagccagacgtgatggtgtatgcctgtaatcccagctactcaggaggctgaggcacaagaatcacttgaacctgtgagccggaggttgcagtgagcggagattgtgccactgcattccatcttggatgacagagtgagactccatctcaaaattaatagatatcacgcaacatgagaataattatgttattgtttgttattgctattatacattattttttccaatcaaaatttcaaagacattgctggtgtgtagaagggcaacttttttttttttttgagacagggtgtcactctgtcacccaggctggagtgcagtagtgcaatcatagctcaccgtaaccttgacctcccaggctcaggcagtcctcccacctcaccctcctgagtagctgagactacaggcatgtgccaccatgcctgggtaatttttgttttttttgtagagacagggtttcaccatgttgcccaggctggtctcgaacctctaggcttaagcgattggtctgcctcggcctcccaaagtgctgggattacaggtgtgagtcactgcacctggcctatattcttttaaatcaagattaatcgacatatattggagtgtcatctgcaagggcccatactgggtgctgaaggagacaggtgaatttcctctttttttttttttttttttgagatgtagtctcgctctgttgcccaggctggagtgcagtggcatgatttcggcttactgcaatgtccgcctcccgggttcaagtgattctcatgcctcagcctcccgagtagctgggactacagttgcatgccaccacgcctggcaaattttttgtatttttagtagagatggggttttaccatgttagccaggatggtttcgatctcctgaccttgtgatccacctgccttgccctcccaaagtgctgggattacaggcgtgagccaccatgaccggccaggtgaatttcttaaacataggaggcaatcaatattttaaataaaatgtactgtttaatgggagtctataattgttactgtggcagtcttggtagtggtggtggtggaaaggcaagggggcaagtgattgatgttcaaggcaggcaggggatgcaacatgcaatggaagttgcattcctattactcaacctactctgcgttcaaaactccctgttcagtcagcaaatattattaaagtgcccactacgttccagatactctcttaggtactagggatatggaagtgaataaaacacacaatttcatcccttcatgagtaaaacatgtggtatgttaaatagtgataaatgggcagggtgtagtggttcacgcctgtaatcccagcactttgagagacatgcagatcacttgagcccaggaattcaagaccaacttggccaacatggtgaaaccccgtctctactaagaatacaaaaaaaacaaaaatagctgggcatggtggtgcacgcctgtggtcctagctactcagggagttgaggtaggaggatcgcttgagcccaggtggtggaggttgcattgagctgagatcacaccactgcactccagcctgggtgacagagccagaccctgtctcaaaaacagaaagaaaaaaaaaatagcaataagtgccaggagaaaaacactagggaagaggattaggaattgtgcatgccttcatgcttgtatctatgggtttgaggatggcctgcaatctcaataatgtgccaagggagagcctcagcaagaaggtgacctttgagtcaagacctacagaatgtgaggtaatgacccatgcagatatctaggttaagagcaatccaagcagaggaaatggcaaatgcaaaggccctgaggtgggatgcgggacatgttcaaggcacagtgaggaggaggctggtaggagtgagggagattagtaggaaatgaagtttgagagtttagatgggatgaggggcagaatgtgtagagttttgtaggccaagaaaaggattttggcctttttcctgcacaagataagaagctgtttggagagttttagtcaaacaagtgacttgatctaactgtggcaactgggtagataatactgttggtagtaggggcaagggcgaaaacagaagatgaaagaatagtttggactggggtagtagcagtgaaggtggtgagaaaggctcagattctggattaaggattcgatactgggatcagggtaataagagatgaaagaaaacctctctgaatttataacagcaaaatgtaatttttctccttaaaaaaataaatcacaacaacaaaataaccctattaaaatgggcaaaaaaaaaaaaaaaaagccaggtgcggtggcttatgcctgtaatcccagcactttgggaggccgaggtgggcagatcgcctgaggtcaggagttcgagaccagcttggccaacatggtgaaaccccatctttactaaaaatacaaaaattagctgggtgtggtagtgcacgtctgtagtcccagctactcgagaggctgagggaggagaatcccttgaacctgggaggcggacgttgcagtgagctgagattgtgcctctgtactccagtttgggagatagagcaagactctgtctcaaaaataaataaataaatacacaaaatgggcaaaaaacttcaataggtatttctccaaagaagatatacaaatgagcaacaagaataggtaaagatgttcaacatcactaatcattagagaaatacaaattaaaactacagtaagatatcacattatacccaacaggatagctactataaacaaatatagaaaataaccagtggtggtgaaaacatggagaaattggaactcttatgcacttttggtgagaatgtaaaatggtacagccactctggaaaacagtatggtgattcctcaaaaaattaaacatagaaaatatgatccagcaattccacttttgagtatacatcccaaaaagtcgaaaggagagacaggaacagatatttgtacccccatgttcatatcagcattattcacaatagccaaaaggtggaaacaacttaaatgttcattgatagatgaatggatacacacaatgtgttatatacacacaacagaattttgttcagctttgaaaaggaaggaaatggccaggggtggtggctcatgcctgtaaccccagcactttgggaggccaaggtgggtggatcacctgaggtcaggagttcgagaccaatctggccaacatggtgaaaccctgtctctactaaaaatacaaaaattagccttgtgtggtggtgggcacctgtaatcccagctacttgggaggctgaagtgggagaattgcttgaacccaggaggtggagcctagatcatgccactgcactccagtgttgatgacacagcaagagtacatcttaaaaaaaaaaaaaaagtaaggaaatgctgacacatgttacaacatgatggaccctgaaggcattataccaagtgaaataagccagtcacaaaaaggcagatactggatgattctatttatatgaggtatctagagtagtcaaattcatagaaatagaaagttgattggtggttgccaggggctggagggaaggggaagtgggcagttgtttaatgaatatagagtttcagttttgcaagatgaaaatctggagattggctgtacaacaggatgaatgaatgtatgtaacactactgatctgcacacttcaaaatgagtacaatggtaaattttatgtgtattttatcacaaggaaaaaaatcactagacatctaacttttcagtaatgtgtctattttcagttaaatttgccagttaactgaagccaatataggccagttttcatattccttagtgttatcacactggtgcacttactgttttaccattttcccttctgatttcatttttctgttagcatttactactatctaacatatattttactcatttgtctgtgttccccatcagaatataacttcatgaggggagggattttctattacacttagtgaaaagtaaatccctcaagtaggaacactacaagtaagcacagttttttttttacagtaagtttgcttaatggctagtaaactatctcagccagtacctgagtgactattctgacttgtatcatttaacaagaaaaaaggcctggcgcgctgtctcacgcctgtattcctagcactttgggaggccgagacgggtggatcacttgaggtcaggagttccagaccagcctggccaacatggtgaaacctcgtctctactaaaagtacaacaattagctgggcgtggtggcacatacctatagtcctagttacttgggaggctgaggcaggagaatcgcttgaactgggaggtggaggttgcaatgagccgagactgcgccagtgcactacagtctgggtgacagagtaagactccgtctcaaaataaataaataaaataaaataaaatgaaaaaaagtactaaatgcaaacttcttaagatcacatgcaacttcgatgttaaatactaaatattccttaaatttagacagtattcaatttggtaaagatcagaaagttatattttgtcatttatgatatcaagtggaatgtattatcagtgattatgatgcttctcgcaatgagagttataactttctggaaaaatccttgctcaaatcatcaaagttaagatttcttactacataaaggctatgaagagctgacgtgtaattatattggctctgcaaatattggaacagaaatatgagtttgccattagtgtaagaaaagcttcagaatatgtatgcaaatttggcaaattgagttggttttccccacggtacttcgaataaaagagacattttaacaaatcacaggttcatagaaaatctctagtttcgtggtctattttctaaaataataggaaatgaacttttaataaaagtacatgaggacttttgatgaacggtttatttttcacagaagtgaagtgcaggtgaaaaggggaaattcctagaatatctgaaggatctgactaaatgaatttctacctaagctattgatttacagtaacttaaaatgtgataatttatctcctacaatggcctttcaaattaaatataaaagtaactcagagtaaagtatgcagaaaaaattttggtattgtaactgaaaatgaccaacattaatttttttctctcacattaatcaagcaccttactgttagaagggaaactgacaagcctcctcaaccgagtttatacaaaattcaaccccagaaagtaaagccaattcgtgcaccttcataagaaagaaataaaggacgaacctacacattacaatttgtaaagaaacttctgtagaggcaccatcgttctacaaccttatgcactttaaaatctgaggtaacaaggcatttgaagataaccaaggttggccgggcgcggtggctcacacctgtaatccccccagcactttgggaggctgaggtgggcggatcacgaggtcaggagtttgagaccagcctggccaacatagtgaaacccagtctctactgaaaatacaaaaatgagcgggcacggatggcgcacgcctgtagtcccagttactcggcaggggttgggggctggtgggggtggtagtgctgaggcaggagaatcgcttgaatccgggaggctgaggttgtggtgagtagaggtcgcgccgttgcactccagcctgggcgacggagcgagactccgtctcaaaaaaaaaaaaaaaaaagataaccaaggtttattgctacttccgtgatatcaccatatcaccaactgcgtaagcagtgctatttagttgaaaatacatggactagaccgaatatttctgcaacagtttaataagagacgatgatgcgactactgcagctgtccccaggcaattaaactcttcggcgaatttctttactattgcttttgaacagggaactgtttgctattttagggcactcgtgcggtaaagaacttcactgaaaaatgcaaatatgttttgctaatgtgggagaaagatgatgatcctctgaacctgtgacttggaaggggggataaaaaagaactatttcttgaattctcgccttgctcttgctgattcgatgcacacaaccccacgaacattcagattcatggcttgacaaagtggggataaccgggagctgcagccccgtctttgaagcttttgtaaagacaaacggtctgcaatgttaagccttaaattggcttttggcggactccagccttttacccttcgtttggtagatgttttcacctcgctgtcattaagcagggtcaggaaatggaagggccgtgaccgggtcgccgcgggcgctctgtgggcgatgagggtctcctgagcgagcaagaccagtctctnnnnnnnnnnnnnnnnnnnnnnnnnnnnnnnnnnnnnnnnnnnnnnnnnnnnnnnnnnnnnnnnnnnnnnnnnnnnnnnnnnnnnnnnnnnnnnnnnnnnnnnnnnnnnnnnnnnnnnnnnnnnnnnnnnnnnnnnnnnnnnnnnnnnnnnnnnnnnnnnnnnnnnnnnnnnnnnnnnnnnnnnnnnnnnnnnnnnnnnnnnnnnnnnnnnnnnnnnnnnnnnnnnnnnnnnnnnnnnnnnnnnnnnnnnnnnnnnnnnnnnnnnnnnnnnnnnnnnnnnnnnnnnnnnnnnnnnnnnnnnnnnnnnnnnnnnnnnnnnnnnnnnnnnnnnnnnnnnnnnnnnnnnnnnnnnnnnnnnnnnnnnnnnnnnnnnnnnnnnnnnnnnnnnnnnnnnnnnnnnnnnnnnnnnnnnnnnnnnnnnnnnnnnnnnnnnnnnnnnnnnnnnnnnnnnnnnnnnnnnnnnnnnnnnnnnnnnnnnnnnnnngctgcctcctcatacccacacggcggcagagaccttcaccatagcgttcgctcaactccagaaccttccgacctccgctagttcctgcgggcctttgcccgcttcccggtgcaccctccccgggagacacctcagacccccgacagcctgggcaggctcggtgcctgcgggtgcgttcctgatcacccctcccctcttccctccccctcatcctccattcccttgttttcaccctctgtcctctgcccgtcactccccttgtcacctcttggagccccctcctaaccagcggccagtgggtttcccataccccaggatgtgagcctctttaacctgtaatgctgtggctagcccttggcccctttcctgccatggagaaccaggtgctggtaattcgcatcaagatcccaaatagtggcgcggtggactggacagtgcactccgggccgcagttactcttcagggatgtgctggtgagtggtaatctcagtgtccggatgccagcaagggggactcagggacttgagtagtcagcaccttgaccactggtgacctgagccagtggcaatggctactgctggcttcctgtggaggcagttttattgcttcaggcacagcattgataaattgcaaccactaaaacctggcaaatgtctaggaccctggggagatagatcaatctgactgaacccctgccctcagagagctcatggcccgggctgggacacacatatagacacaaccacgcaaatgcaaactgctgaatctagaagagaggttttttccccccaagtgtttcggggaatgtccttggacagattccagccttgtttttctactgagttctctgaacttggtgaccagctgagaaagggaaaaaggacaactttaacttaccatgtttgagcacactgtttcattaatttattttgagacagggcctcactctgtcgctcaggctgcagtgctgtggcacgatctcggctcactgcagcctctgcctcctgggctcaagcgattctcctacctcagcctcccaagtagctggcacatgccatcacacctggataatttttgtatcttgtagagacgaggtattgccatgttgcccaggctggtcttgaactcctgcgatttgcttgcctcggccttcccaaagtgctgagattacaggtgtgagttactgtgcccagcctgagcaaacttaaagcatcattgaatgtaagacattttacttagaaaaaaatgctaaccatgacagtatgacacatcatccgttattaaaatgagtccagtttcagagacggtaaaagtaagggaaaatgtgcatcttagaattggtgatattttacattcagatttttcagaatatatttcaaataaaatgatggaattttagagcagagtgtaacactgtaggtggcctgttcagctgatgtttcttttttgcagatagttactgaggagcagtgaggtgaaatggcttttccaaagctgtgagctcctgagtgggagagtcagtaccagaactaaaattttgtttcattgacttagtaggtttctttccctacatgttgcagccgcttctaatctttctggtattcatttgagatagacagggtgccttgtgcccattctacatgcagaataactgaggcatggaagacagaagcggacattccgaaaagcacatcactacctgcaagttaagagtgggcaaggtggcaggatcttgggaagaggaagatttgtgatgtgatttttcattgtcttgggtaacttaatcaaaatttgatttctataacttcattttgagttctagatgttactgactgcccaggccatgcagatttttgggtgccttgaccaggagctttccatattgtgcatcaaatgccatccttctctttgtatccggagttctccacacagtcatgcacatacagatttcccctcatgataaggcccaggctccttcatgtggtcctctgggcacatctggattggcccctgtctgcctggcacctgtgtcatctctcttcacggccccataaacttctgtgcctcacttacataggttgattttcatttctcccaggtgtccaggctgtctgcactctgctcttcaccggtcaattcccacctgtccttccaagccaagttgtgctttttctctgtgtcattcttggttatgtgccccacctctgtgtcgtcacagctttgtgtgggtcccccagcaaagcacatgtttgatcatgattctttgtctcctccactagatggtaaacttctggaggagatagatatgtttgtttttgtttcttcataggaccccaaaatacttgtttaagaagggagcttaaaagaggatgcatgcaattatggttctgtggacagaacactaggtttagagtcaaggaatttgggtttaattgcaagctgtcccactgactaggcaagtcagtctacctctctgagccttagtttccttatttgtaaaacagggaaacttgtaccttcctcaaagacttggaaagattatgtgagattgtgactgtgatgagaaagatgggttttctcttactcatttaaaacaatggaaggttgattattatgtgattatattatttggttatgtgattatttcaagaatagcccagtgtttaagaccacaaactctggagccaggttgtttaacttgcaagttgtactactggggcaagtatcttctgtatctcagtttctttatttgtgaaaaaaaagttggggaggggtgaaagtaatgcctacctcctagagttctgaggactccttgagttgatacatgtaaagcactcagaacaacttagcacatagtaagcgctccattagtgttgttattattgatgggattgttattataagggattggacttgggtcttctgtttcttgagcatctctaagttgtacctggctcaaggctgactggcttaacaggaaacacgagtggccccaccactagagctcagcatgccaggtgtctgcacacttttggctaggtaagcccaggtggagcatgttttgtcagaaaggcctgacgaaggacctgtggcagtgggtgttcagtgctatctcctagtgctccattttagcaaatgttcaagcccagatcatggcagactcctgtgatctgttctccaggtttacttcatctcttcatcaagaaaaggcaagaaccaagagacacgtcagcatctctggcttggaaccttaaactttaaagtcacgtggaacctggaagaatcccctcatctaattcagactcatttcgaatgaagaggcatgaaccccacagggggaaaataccttgctaaagccacccagctaatttttggcagaacctgacacagatgccagaagcaggttgtagtcaccgagtcagccataactgagtgtctcggacctgaagtcagcagttgagggctccagtcactgtgcatcaaatagctgggagaccctgggcaagtcagtcggtctctctgggccttgtcttttgtctgaatcatcagggactggctgaactatggaggctgacctgaccctcaaaggtagagacatttgggtcttctgttttgcagctttctgtgtttctctttttccctggagactgagttcctagttttgggaaaactatacaagaggtctggttagtgtgtgatgagagagaatgcccaaccctctcccctcttctttttgtattctgtggtctccaagctcagatttcccctcatctataagacttctgggccaggagtggtggcttaggcctgtaatgccaacactttgggaggccgaggtgggtagatcgcttaaactcaggagttcgagaccagcctgggcaacatggcaaaaccccatctctacaaaaaatgcaaaaattagtgggggcttggtgacactcacctgtggtcccagctattagggaggctgaggtgggagaatctcttgaacctagaggtcgaggctatagggagctgtgattgcaccactgcactctagcttgggtcacagagcgagaccctatctcaaaaaagaagaaaacacacacacacacacacacacacacacacacacacacacacagatttctgtctaaactgagtctgtgattttttcctttctcctgagttaccaaatactattggctgtttatgtcttttgtttggtgcttatactcttaagtgttttatattactagtctttcaggtttgtctttatctctgtaaccagtttataatcttcctaaagtcaaggatcaagttttattgtcctgtagcctacagctttgtgatctttatgctcgtggcatgttgtagatgctcaatgatgttttggatctgtcagatatttgtctgatttattgaaaggaagaagaaaagtatcaaaaaatggtcatcatcaaaatatgtaaacttcggttttcttttttcttttttttttttttttttgagacagagtctcgctttgttgcccaggctggaatgcagtggcgtgatctcggctcactgcaacctctgcctcccaggttcaggtgattctcctgctttagcctcctgagcagctgggattacagatacacaccacacatccagctaattttgttgtatttttagtagagacagggtttcaccatgttggccaggctggtcttgaactcctgacctcaagtgatccacccacttcggccccccgaagtgctgggattataggtgtgagccactgcgcccatcccggttttcttttgaaaccttctttaggttagttaggtacatgttatattgtcaagagcagaagaaggccgcttggaaataagtcactttagctggaaaatgtatataaaatcatcaaatgtaccctgctttaaaatgactagtagatattactgatgtttaaacttcttacctctttgtcattatgattgccccactttatttgctttaaagaacaaaatggttggttgtgttcacatgattctctcactcaagtttgctttgttctttctcccttttcctcgtatcaggtgaggagcatgtgcagtgccttgtttatgtcgatgggctaaggcatgccattgccactgagcaggttttcagttggttgttagaactctgcactttgatggggtctgctattcctaagtaggaaggagcctaaattaatttgctaacactatagaggtacagttcacatctcaagatcggagtttcctggaaataactggtgataacctagacttagagagttggggatgaagcagttgttttcccctcgtttttttaaacctacactggctagaatgagtgttcaataagtactgctgaaggatgaagtcagtgagtgaatcaccatcctccactgattgtagggtgctggaatttcaaagtttattacgaagtaagctttgtaatactccagttattggtgttttgttttatttatttgacactaatatggcacttgccatgtgctagacactcttctgagtactttacaaatactaactcatttgttaggtacagctaagatctgatattacacatgaggaaagtgaggcacagagagattttgtgcactcagctgtgccagagagctagcatccagctgtagctgtttggctgcaatttcatgttttcaggctttccactggattgcctgtgtgctttattctgtactccctttacagtttcctgtcaataaatactttctaactatgagagtgtagaaataattttttaacactaaaatcttttatagatgcttcctcaaaaagttgatgtttcatttgtgaggactagactcagaaaaaaaaatctcttttggctgtaatgagcaaggactgcctaagatagtcctctttgatcagttttatatgcacagatttatttttgaaaaaaaaaaaaagcactatagaggcaagactattatgcaaattgccactgcagcaaaagcttctaaagaattgcctttagaaggaagttgcagccactctgctaagtgccctgcttggaaaggctgtgggctccctgctgagaaatactgcgagcggctttgtcagccggctgcctggtgccagttctgctgcagcctgggagggacactgtggcagagctcctggagagaaatgaggtttgcaggccattggagttggactggacatgatggagggtcactttccccagagcgtaggtgttctatgcttattcaattaagctgtctcagtatactaattttcatgtgttttcaactttatagatttatttaagcattgatgtcagattatataccctttttagatttttgttgtaggctagattaactttatttcggtgtcattaagtatgttttctgttgcttaagagtaaaggttgataagaactgtttgtgttaaatgtggcataatgggtttatatcgtcatggaaacttgggtgtcgaactcctaccatgatgagtgcgaggcacagtgttgcttgttgtatatcaggaactacatttgttgaatgtcttcaatgtgctaggtctaagtttatgtttattagattaatttttaagctacatctataagtattaccagacccattttggagggtaatcaaattgaagctcagagaggttaggtgatttttttcccagagattcagacctacgtcagtctgactctcaaaacccctctctctttcaactgtagtatattccacagcctcccatagaagaaaccaagtttttgtaaatacatgacggtttatttgtatatagactgttgaactgagaataaaatatgttattaataaaatgtggaaaagtttccttaaatatttttcttcctggaatagagctttaaactctgggtttacgttgctgggctaagtgtgattatgagctaatgtttttatagtttatgctaacgtttcaaaaatctttcccaggttctcatatttcctgtaggatttgccacatgttagcaataaagaagatggctaattgtgtttctttattctttctttgtttaggatgtgataggccaggttctgcctgaagcaacaactacagcatttgaatgtaagtctggcttgtatactttcttgactattcctttctgcagtcattttttaaagggtttatgggtggcattactttagaaactgacaaaaacagattatttatgaccatcatatggtacatttaaatatttataaattgatataagtttaatgatgatactgaactgagtaatattttcttatttaatcatatcttgggtgagcatatttctacaatatagctttaattaccagcatgacctttatctgctcttgctcctgattgtgataatattgcaggacaaaatgaaacgtgtaaactacctgtaggccagtgattattgattaagagattttaatccattgctgctttaaaacatagcaacaaagtagagcttttaccatgagcattacatggaataattctgttttagtggggcttagcagggatgctagatggtgacaggaacacttcaggtctttagtccttcctttttccccacagttggcctggggacagggccagggtgacctggggactagaaaactgttttgtcatgaaccaggtcattgcagaggacatcatggaatgagtcatgctacgatgagatagtcagtagcataagggcccggatgctgagagggatgaagtaagaactgtagttttttttttttaagatgagggctacttttttcttttctttttcttttttctttttttttttgccgcagactctcactgtgttgcccaggctggagggcagtggtgcgatcttagctcactgcaacctctgcctcctgggttcaagcagttctcatgcctcagcctcctgagtagttgagattacaggtgtgcaccaccatgcccaagtaatctttgtatttttagtagagacagggttttgccatgttggccaggctggtcttgaactcctgacctcaagtgatccacccacctcagcctcccaaagtgctgggattataagtgtgagccactgcacctggccagagggtcacttcttaatgtagaaaaatttcagtttttccacaataggatacttttttgtttctgttttttatgaagatggttacttacagagaatacaatgagtacttcctttttggaggataattaggcatttcttatcaacatataaaatgtgcaaaacctttgacttagcagatccactgtcaggaagcagttcaacagaaatagctacacatttgttgaatgcccatcaaacaaagtgttcattgtgagatcatgatgataattattgttatttttagagacaggatcttgccttggtgcctagactggaatgctgtggcatgatagctcactgtaaccttgaactcctgggcttacacaatcctcccacctcagcctcccaagtaactgggactacacgcatgcaccactatgcttggctaatttttaaattttatgtggagatggggtcttgctatgttgtccaggctagtcttgaactccttgcctcaagtgagcctcctgccttgacctccctaagtgttgggattatagatgtcagccactgtgcctggcccactgtgggattatttatttattttggagatagggtctcactcttttgcccaagctggagtgcagtagtgagatcacagcttgctgtagccttgacctcctggctcaggcttgtgggattattttcaatagcaaaaaattagaggtaaactaaatgcctattataatggattaataaattactatttgtctataattcaaagcattcaacagtgactaaaaagaatgagttaggattttttacatttgtacggaaagatatctgtgaaatattgttgaataaacaaataatgcatatagtatgatcccattttgtaaaatatccaaccacgcttccccaactttatgtgtgtattgaaagataggatctgaagagtgcctactacagtactttccagtgacttaccctgtaaagtggacttggggcctgaggcttgggttggtgggggcgggagggggtggatgaatgatcacactttttactttgtatgtttctctattgtttgaacatttttcaacaatcattgcctgtttttaaaagctataatgagtagaactcaatgtaattagtattttattagtcacattgaactctgtactatagaaaaatagtacatctgtctgaaatacatactagtgttgcaagctttattcagactctttgcagtaactccttgcaggttccacgggtttcatggacagtctgatagttaacattcggagtacttactgttgacagatgctttgctaagagcattccatgggttatcttatttcttttaaccatcacaagatccccacgaagtactcgttatttttttgagacagagtattgctctgttgcccaggctggagtgcagtgacatgatgatagctcactgcagccttaaactcctgggctcaagtgatcttcctgcctcagcctcccgagtagctgggactacaggcacccacctccacacctagctaattaaaaaaatttttttgtagaaacggggtcttgctgtgttgctcaggctggtcttgaactcctggcctcaagtgatagtcccatcttggcctttcaaagtgctgggattacaggtgtgagccactgtacccacgaagtacttaaaaggacattattagctctgttttttggttgaggaaaggaaatctttaagcaacttgctgaaagtctctcagctgttaagtggtaaagtggaatttctggagtagtttccagagtgtatattctcaaccactgtactggacttgttttgagagttgtcataattattgaaatcatatattctggttgttcttaagcatggtaaaaagaagtttactttgtactttttacttgcttttcggatccccaaagtggcttgatgtgcctgtgcctgcctcattggcttccagttagggttcataataataataatactgattattttaactatcattcattgatagcttgctctgtgccaggcagtgtactagatgacttgcctaagttgttagtaatctttatactgagtctgtgaaataggaaaattatacctgtgaggaaacgaagcttagaggcctgaaatgattgctgaatgtgattgcttggaacggtgaagcccaggttcaaacacacatctttttgactataaaacttgcactctttatccccaagtgtgtcaaaagcctgttaagtgtaaatatagataaacctctactactccaggtttacgttctgtgatatcatgctctttcttttgccccatcaatggcagcagctctgtgcccatcttcatgtgggccagttttaaatgaaaaacaataaatacaaaacatacccacagacaaaataatgacagttcttagttgttttgtgtttggattatcatgtactttccactatagacttgaaatcctaggctggcttttttcatgattattttgtggtgacttttttttctgaaccagaaatccgaaccaataaatggaatctatgtttaagaaatagttgaggccgggcgtggtggctcacgcctgtaatcccagcactttgggaggccgaggcaggtggatcatgaggtcaggagatcgagaccatcctggctaacaaggtgaaaccccgtctctactaaaaatacaaaaaattagccgggcgcggtggcgggcgcctgtagtcccagctactcgggaggctgaggcaggagaatggcgtgaacccgggaagcggagcttgcagtgagccgagattgcgccactgcagtccgcagtccggcctgggcgacagagcgagactccatctcaaaaaaaaaaaaaaaaaaaaaaaagaaatagttgagaagatatagcttataaggaattttggaaatatttcagtggcttatgggtataatggaacaacccttgaataaatacaactttaataaaagaaatacttatagtaatacatttttggtttttttgaaatggtctggctctgtcacccaggctggagagtgcagtggtgcgatctcagctcactgcaacctctgcctcccagactcaagcaatcctcccacctcagcctcctgagtagctgggactacaggtgcatgccactacactggctaacttttgtatattttgtagagatgggctttggccatgttgcccaacctggtcttgaactcctgggctcaagcaatccatgctcctcagcctctcaaagtgttgggattacaggtgtgagccaccgcacctggccttatagtaatacatttaatactgaaaatatacctaacactaattgatatcttatataaaagaaatggtgttatagttagtgatatgaattaagcaacaagagatagggtagctgtcaaatgtacctgttttgtataaatgtagagaaaaagagttgagtgagtggaaaagaggggaaaggtcaggtaatgttacagattctccagttctgagaaatggcgtctcttcaatgaaacctccggtgattccagatggcattaatctctctgcacctttactagagcagggaaccccttcaacctgccttctggtgtgtgtgtgcatgttaacttccctcattacattttgagtcacttagtgataggtacgatgttttattccactctttctctcttcttagtaatgagcttgctgccttagaggaacacacttgttgaatgagtggaacgttatgtgtgtccatattcaaatgaaaattataaaatgtatatggtctaaatctaaatgagtaatttgcgtttttggattatttgtgttatagcctgagcatgggatataattggttggtggtggacagttcaggcctccaaatcaaattcccacatttgactgacccaagggggtcaaacctgaggagctgtattctttctgatttctttttctgggtgtggtgtttccaaggggagttagggctggatgaggagagggacatctgtctgcagaactcaccttttgggctgatggtcctaaaccttgttttcttattaaaaggacctcttttaggtccttattctccattacatctagagctcacagttctacaggctgtacaagcatggcactagcatctgcttgcattctgctgaggaagcttttacttatggcagaaagtgaaggggcagcaggcgtgtcacatggcgagagagagtggaggaggtgccaggctccttcaaccaaccagtttctcacatgaaccaacagagtgagaacccactaccatagagagggcactgagtcattcatgggggatccacccccacgacaaaaacacctccttccaggccccgcctgcaacattggggatcactttggaggggacaaatattcaaaccatatcattgtggaaataaatttgtaagataaattcttagagttggaactactgagacaaagaatacccatatttaaatttcaatatctattactgtgtttgctcaccaaaaggtagaaccaatctacactcacaccaacaaggtatgagaaggcccatttccctccaaccccatcaactctggatattagcaaaccttttagtcaatgtcagtttgataggtgaaaatattactgtgttactgttttattttatattttttaaattgtaaatgagcttgaatatcttctcatttgtatttggctatttgtatttaatttccttttttttttttgagacgcagtctcactctgtcgcccaggctggagtgcagtggtgtgatctcggctcactgcaacctccacctcaggggttcaagcgattctcctgcctcagcctcccaagtagctaggactacaggcatgcgccaccacacccggctaatttttttgtatttttagtagatacggggtttcaccatgttgaccagactggtctcaaactcctgacctcaggtgatctgcctgtctcagcctcccaaaatgctaggattacaggcatgagccaccgtacctggccagctatttgtatttcatttctataaactatttgtcgtctttgcctgtttttctatttggttatttatctttttctaattgatttaagggttttccaatattaaggttggccctttgtcttgtgtgttacaaatgtttttgttcagcttattgctcttttcggtttgttctggtcttcttattctctcttcttttttccgtggagaagtttaaaatttttacatggtcaaacttacttattttcctttgtaacttctgggtttatgtcatgcttagaaaggtcttctacagtccaggatattgaagaaacattcattgatattcttttttccttctactttaatgaggttagacacacacacacagttatttatataaatttgtatgtgtcgtattgtgggtttttataaaaagcatgtatttttattacaaagttcagaatttgtttatttttctttttcttttctttcttttttttttttttgagatggagtcttgctctgtcgcctaggctggagtgcaatggcatgatctcagctcactgcaacctccgccccctggattcaagtgattcttctgcctcagcctccctagtagctgggattacaggtgcccaccaccatgcccagctaatttttctattttttagtagagacagggtttcaccatgttggtcaggctggtctcgaactcctgacctcaggtaatccacctgcctcggcctcccaaagtgctggcattacaggtatgagccactgctcccagcccttgtttttcttaattcttgcaccatcttcagtttattttggtgaaataaatcaggtggggatccaactttatttttcaagcagatagttgattccacaccagttatggaatagtttttcttttcccagatgtgagaacctttctgagatgaaggtaaattccataaccataaaaaatcctgtgtgtttgcatttctgggtcctacatatgctgtaagagcttgacattcatataggcccagagacccctgctgattttcacagtttcattagcagattaatgagtacaccaacacatgaggtgataaaaatcaaccgtgcccactaatgcatttcctgtgcatatctgttacttgtgttcctctgccagcattttctctagagaagtaactgctataaaatgactgttggattggtgttcgtggacagtaaaatctcactggtgacttgaaacatgcattttaagtccatgtagacaaatgctgtcttaaacctataaaaaccatgtggtttcacttttctattacactcatgtattctaatctgtagctctcagaagtatcttcacacttgtcaaaccgtgtgtctgagtttggttcagaaaacatggttatagaataaatatttattgaatttgtgcctttcttcaaccccattttatactctctccttattgcacagaatcattttcagctgttttatgaactgctggaagattattttgtatttagggtggaaatctttaaaccaacacattatgtctcattttaaatttggcatagtatgaccatttaaagctaaattgcaattctggaagttgtaaattctcagagtataggaaacaactatagctgataactggagtgacacctgtaggagatactcttgtgttcagctagccatgacaatcttgttaagaatagttgggtgggagcctctttttgcttcagagaagagtctaaatcataaaatatttggaagaaatgaagtttcatttccttaaactattgtatatgtaaaaatataaagggtcatttttaagtaaaactaggtaagttagtgaaaaatggtcacaataaacctacactgagcctgaaaattatttaacatgtaagagttaattatgcatcctagaatttggggcaaaataagagagctttaatttgttgaaattttggctggaaatattactgatgcaaaaagtccaaatcccttttagtcttatgagagtagtcatttcttattaatagtcttgctaatttgtatgaaaattaagaagtttgagtcctttactcaagcaccagactagttgttccttaaggtcagtggacagtgcagcttatttttgaatccctaccataatggtacctggcacgtaataggcactctatgtgtgtttctggaatgcatggatggttgaagagtgaagtaataaggataagctttctatatcccattcatcagcaagtcctgttggctctatcttcaaatttatccagcatgtgatgacttcttaaaacctcagcttggtttaggccaccatcatctctcaccgggattaggacagtggcctccaaactggtctccctgttctacttttgcctctatacagcctcttttccacatggcagccagagtgattcttttagaagtcaggtgacaccaccacgctcacaaccctccagtgatttccatctcactccaaagtaaaagaccaagtccttaaaatgccctccaaggctctgcattttcgcatctggcctcaacctgtcccaccattgtttctctgaacccgtgtgtttctccccaaacctctcattctgttctagccactctggcttcctttcggtctgtcaaacatgccaggcattcctctgacccagggcctttgtattagctgctgcctctgcctggaacagtctttccccagatatcagcaaggcccactccctcacctccttcagtctctttccactagagtgtatgttccatgaaggcaggattttgtttgttttttcttttttcactgttactgtcccagtgcccagaacagtgcccaccacatagtgggtacttttatttgctggaaggaggaagaaagcaaagaagtaaggaaggaatcaggaagagggaagcaagaagctaaattaaaactcatggatatgaagatgtggccatggaaagtacggcctctggtcctgcccacgtcattaactccgtgcctgagaagggctttaaacatgacatcttttccggtagtttcctgttgatgtctttctaacttctataattatgttttcatttcttttctcttacctgggaaaagtgcctttgcagtagttctaattgccacctggcacagaaggagtgtgacaaatgacatataatatattgccttaactttctgtagctctttgtagaagctagattgtttctcttgaaagccttcttgagcccctgtcactgcagtgggtgctgtttggctgagagctccctggagtctgctgtttatctgctgtttactcagtaggccattgtgaccgccccttacctgaggctgcctctcctctctattgggcctttatgtttctcttcttggtttttcttttggattgcatgttgcctcaaataaaattgctaacaacatatggcctgttatgattctcttttcccaaactctgccattttgtatatttgtgacacactgcagattttgtgaagattgcttcataatatttgtttaccatctgctgcactctatttggtatcttgctaggattttttcctccattttaagtgacattaacaaaatctagccagtacataggctttctggttctacttttgcttccctaatgtgctggaaaatcatattactatgctccaggcaactagagaagcctggaattctcattgtgaaccaatgtatcagatctgtctgctcccctacccccaccccttttgttggtcatatccggtaacgcttttttggtcagatggcaaagaacctccatgtataagatagaaaaagctcaaattattttcttgcttcttagtaccactactttctagtgttgttctctaacatatttgtacctctgaaactttgtggcagtttagtaagtttttatgatttatggttccagctagtgtaatttttacagcttatccagcttgataggcagctagcctgaatcttggctagatgggctgtatatatccaagtttttgttcagaaaagtattttaggctactgtcatagtaatttgcttagtatgtatttctgctttcttacccttcactaacttttcgtagctgtcaattcactgtctttagagagaagtgcatttttgctttacaggttaaggtgagtggtttgctcttgggctgccatcaaggggtcagagacagctcagcttttgccttttggctggagccaccagtcttctcatggatatggttacttttctaactcagtttcctcttggacaaaaacaaggagtctttaataaaacgactaagcatagatattaaagagcaaatcagacagtctcccaaagagcagtttgtaaagaaaaccaatacctatataaagctaggtatcctattaacccacaacaactattcatcagtatgccatataagcctgattttatccccagcctttattagaatgcctctttcaacttatctgaaatcttcttttggagtcagaccccctaaggggagagttccaacattttatcactgggttgatgtcaaaagctattctaaccttttggcttcagttttctgtccacttaagcaaatgctcttgtaatgtttcatagctactttttatgcaacttctcttcaagaaattattctggtagctgacttctttcacagatctttttcttctgaaataatccctcaagagatttcttagaaatttagaattccaaaatattttggtttaagtagccttaaaggttcaagctctagctttgagaagttgaagaactctccttttgttcttgattgtgatttaaatgatttttatgtaatcggtgcccccccctttttttaaataaattataagaagggttttcactcgttttaccaaaatataagcacttgcccatcctatgtgaacaataccttattcaggtcttgggtatattgaaattcaaatataagcagtctctttttaaccataatctctatagctagcttagttgcagaaatgagatttattttaaaaaaactactttattcaggctggaatttgtttttatgccaagttcagaacttcataaagaacaaatcagtttagcctacatttaaagagaatttgacctggttttaaagcaaaaatgtaaagtgctttcatgtgtggtgatatgtaacattacatcatttgtactttgttttttcctgtctcctgcatttttaagaaaactttcgccttaaccttgaaaatattagtttctagaacttatatatagacagactcctttcttctctctctacagctggaatggcatttctcccccaatttggctctagagattctatatctaaagcgaatgaaagaatctttatgtgtgtaacatctctcaggactgtgccttcttcattactgcaagtgaccagtgtatgccttttactctgaaaacaggcaactcttgatagcagaatactggtagtgactctcctagatttagacagtgtgatcttgatgataccgattcacactgagttggggaactctgcagcagtgaaccaggatccagaaacaagtgcttggaaagaaaacaagtgcttggaaagagtgagagctatgggtcactgaacaggactggtccaagtgctggtttcgatcatgctatcagattgctgttggccactgaagagataaagggagaaagtattttgcttgaaattaggctaattgtgaaagaacacaagcttcctcctagggtccccatagcctagtcaccaagcagggggatatccttggaactacagccagacaggagggaagacccactgacttgtggtaggggaagatccctgtgttgaactgaactccctctgtactttcagtaagcatcccctgaccatgttgggcaagcttattctcttcatgatgagagatttgtctgaggttctccaggcttgggatcagaacagtctttctatatgatcaaatcagcaattatatgcccaagagtgaacaaaaataataattccgattgttaacaccagaactgaggcatcctgctgagagcctgccccttccaagttgtccccttgggaggctctgtacgttgctccagacgtttttggcatttctttcaactgtgcatttacagtctactacataggctgtcctcactgttgacaaatctttatagaaggatgaagagttaactatatatttggaaatagccataagtcattcttagacatgcttggcagatgatgtgggtaagtgatcaggccaacaatttcattttgggttaaaaatgagatttaatattctcacatagtctatcttcaggtttttaaagcagttttgaagagatatttcaaaaactactttgaataagagaagtatcatgaaataaatacattatttctagatgtggcctctgatgatacttactcaaatttacacattctggttatgtagtttgtgaagtcttgtcctccagccttaagacttaaattatttcaaaatagcatgaatagcatttgaagctttctatggctggagagtatgcaaaacaagtgaaactgttcggaaaaagagctgctaaatagaatgggggagacctgtattagagctgctttacaagttaaccttgcactaggcctaggttctcctgtggaaagagaataataataatgatgttcatgtcgcaggtttgttatgaggttttcaaggaggtattgcatatgaagcatagatcacagtgcctcatgtattgtagtgttcagtaagtgttagccatttttatcatgctgttgtgagatgatagattgcctgggagagaggaagaatggagaaatcggggtatggtgctgtttgggagatttaaaaagtgtggatagtagaacaagactggcctctcgttggtttttagttccgctaaccaaacctgttttgtcatactccagttatatttactttaacctagagatatgttgtgaatgacatgagcaatattttaattttctgctatccctaaaagaaagttttatattgagattctgatcatattccaaatggaaaacaaaacaacaaactaataatgtcaacatacccccaaaatgtggtgttgagggttagaatatcacattgtaataaaccgtttatattatgttccctttgtgcattaaacaaatgcacaccttatcatttgcattatgtgcttttaaacagatgaagatgaagatggtgatcgaattacagtgagaagtgatgaggaaatgaaggcaatgctgtcatatgtaagtatacgacaaatgaagactattttttaaaatcttaacgtgattgaggatgctgtttcttgggcatagtgaagacgagtaaataaatcacagttgtcatacatttttctatataataggtaaaggtttcaaggatttccgtatgtgaaagttaagggcattattttcaaaagacacttactgatcatatcataaacattaagaataatgcatcttaatgacttttgcattaggtatgatgcagactaaatggactatcaatttcctgtattttttatgcagtacttaaagtaacggctcattaaaaatgaacccctgggctctaaaaaatttttcaaaatctactttcaactggagatctctctcacccttccagactatagtttacaatgtagctgcaggcttaatatggatacacgatttaaagatgtactgttggttatttatgcactacccataatactcccaccgaaaatgaactacagggctacttactgaatcaaagtgatctgaatatattctgaaacgacttttcttttgtgtttaaaattttactgaaaatctgcgttaacagttatctgatactgaagtaaacaagagaaaagggcatatttctaaagcttcaatactaagcttgaaaaattcagctatcatgaggagacataggttacctgagtcttgatttgtgccttcctctcaagttttgttttgttatatctgagtctgtaatctgtttacaaaaccttttcccgtggcctggtagaaagagcattggactggaagtcaggagaccttagctctactgtggtttcttggccctaggcaaatcacttaacctttcagtgctgtagttgcctcatctgtcaattgtggataataatacttgtcctttatactgcacagggccattgtaatgatcaaatagaagaatagatgtgaaagccctttgaaaagttaaaagttctatacaaatgcaaatgatggaatcatttggaatcatgtggaaatgatggaatcagggctcttgcttttcactgagaccctaatcttagtcaacagttaggttgtaggtttttgatagacttcagcttcagccaggatattgtttcattgtaatgaaaactgtaaactgtctgtatgggtttctgccaatagttttaatttagggtaggagaatagagaacaagaaggataggatgattaacagagcattgcattccaaccagcacagaataggaaaagtcaatttcccattgacttcgcattaacttatgtgagagtctttgtgtactgagaatttagagctgggctcatcagtaccttgaaaggcagagtaggattgtctgctgaaaaggtctaccactggtattgatagattggctaactctcctgagaatgtgacatgcttatttttagaaaacccacacacacagatgggttctaattttctcacatatgtccattgcagagaactgacatcaatatactttcattatgtattcaacttaaccacatgcaaaagatatgtacttttgggtatgatcttacaaattgtgctttttgaaaatgttagtgggtgtggtcacagtgataatgatgatttccatttctaagttactgctatatacaaaatgcttgaggtatttaatttttttagttttaataatcactctgtaagacagatattatcatccttattttttagatgaggaagctgtggttaagagataagcccaaggtcttagagctagtatgaatgtgaatatggaatttaagttcagtttcttttcatgcccaagctgttgctcatttactgttttacactgtctctcccccaccttcctctttgcaggattttttttatgtcatcactgttatttatttttttttctccgagatggagtcttgctctgtcaccgaggctggagtgcagtggtgccatcttggctcactgcaacctctgtctcccgggtttaagcaattctcctgcctcagcctcctgagtagctgggattacaggcacccaccaccatgcctggctaatttttgtatttttagtagagacggggtttcatcatgttggccaggctggtctcaaactcctgaccccgtgatccacccgcctcggcctcccaaagtgctgggattacaggcatgagccactgtgcccggcctatcatcatcattattaaattctgaataatttgggtttatataataccttagttgtgatttctgcaccatgtattccttacagcatatgcttattttctcaaattcagtgtttaattatttttgtgttgtaggaaaatatgattacataatcttacattacatgtccttagtttaaaagtttctgagattacttgggtccacttttttttatctgaatagaagtcatctatctcattgatgagataattttaaaaaattttttgtagagatagggtcttgctttgttgcccaggttggcctcaaactcctggcctcaagtggtcctcctgcctcagcctcccaaggtgctggaattacaggcgtgagccaaggtgcctggccaggttggctgtcattttgatctgtcttggttcttatgattgaaatttaaggagaaccatttggacgtaaccttacagtaggttttgattggtagtcctcatgattaccagcatgttcctacaaatttgcattggtctttattttgtaggttcaatttggctctgaagtttgagtccaggatttcgtataaaggcatagggaagatactgacagattaccacatttttattgttttttgcaaaaagctgtttttttcttttgtttttggtcttgttttgtttttgagatgaagtctcattctgttgcctagggtggagtgcagtagcctgatctcggctcactgcaacctccgcctcctgggttcaagtgattctcatgcctcagcctcccgggtagctgggattacaggtgcccgccaccacgcacggctaatttttgtactttttggtagagatgggatttctcgatattggccaggctggtctcgaactcctgatctcaagtgatccgcacaccttggcctcccaaaatgctgggattacaggcatgagccaccatacccggccaaaagagcttagtttttcatatagaattcagtacacctgtggtcatcttagtatttctttaaaagccatatgtgggaaagcaaaaatagaggcacttttaccattagtcctttaatcattctttttcattgattacaaaggttaagtaaataaacagcctatatctctgcataagaataaaaacaaatttgcaacctctgagttgaaacttgaagaattactttttccccctcttggatgcaggcattttctggctttgggccagtacaagtgtacatttttatcagtaatttaaatagatttttgtattagacctgaaaatgttgcctttttaattgaaaacttatcaattatttaaatcactagcagcctgaggctgttaattttatgagtgccataataatggcatacagtggtttttgatacatgtgacacgtggaatattgtattatggtaaggatttgtcatgacaataggttgttgtgtgctgttaaataataaccaacatattaaaccaaagtctgttgtcacacattagtaccattttatgtaagttatttagaagttgtattcttttcttcattagagatatttttaagagataaagagaagaaaacaaagctataataaattgtcttttaagaaaatgtaaagtaatttggtctccaaggagatatttaatgtattgaaagaattcagcagccaagtgttattacagcaccattgtgatagctgctctgcattttgttatgagtttgtgttaatcaacaatctgtttttatagcatagtttcttgtaagttatgttgttagaatattccacttctgggatcacggcttttcctctgacactattgcatctttttaattcctccataaagttttttttttttttttttttgagacagagtctcgctctgtcgcccaggccggactgcggactgcagtggcgcaatctcggctcactgcaagctccgcttcccgggttcacgccattctcctgcctcagcctcccgagtagctgggactacaggcgcccgccaccgcgcccggctaattttttgtatttttagtagagatggggtttcaccttgttagccgggatggtctcgatctcctgacctcatgatccacccgcctcggcctcccaaagtgctgagattacaggcgtgagccaccgcgcccggcctaaagtatttttttaattagaatttgaaatgctttattagaaaaaaaatacacacaacctacatattctgaaaactaaatacctgatcattgctaattaaatattcccttaatgtagtttaaattttgttgttgttgttctcatttcctcctctcattttctagaaagattgaaaatagcgtgctgcttttttccttccatttttttgtgtttgttgtctggtagttctatggaggcccagttctaggaggggattattttactgttaacctcttcttttgggtgacctttcattaagaaattcagccaatacatcttgcttttgtaagtagatttatatttgtttctgctaaatcctgtgtctagggatttattacacctggttctcttaatattgagaggcttgtgtgagtagaacacagtattaacaaaaataattttcatcattttgtctattctcactctttatatcattttttcccacattgccaggagagtatggcatacattttactgtagtgcctcccattatgagaccttgtattatatttagtacaagagtccttatatttaagtgaagtgtaagtattccctttggtgtatttgaccacagtgtaccctgtcagacgttgagtactatgagggaaaaatactttttgacctgtggagcaccttataaattgggatatgattggctttatcctaatatacataacttggacattgcctctaaaatcatgcagttactcaagtagagttggaaggtaaccacagaggttttgttcaactctttcattttacaaataaggacattgaggcccacagagaatagaagattcagatatcagttggaagtcacatggctaattaaaggcaaggcctggatacagactctcagtctctttgctcctggttgttttaaataaggtttttgttttgctctctattatagtcctgctcagctttgcaaatactgctttttcctgagtgtaaaaaataatacttattaccaaaatgtcactgtacttgagtttgtagagaaatgtaaaaaatactctgttggctgggcgcggtggctcactcctgtaatcccagcactttgggaggctgaggcgggcggatcatgaggtcaagagatcgtgaccatcctgactaacactgtgaaaccccatttctactaaaaatactaaaaattagccgggcgtggtggcatgcgcctgtagtcccagctactcgggaggctgaggcaggagaattgcttgaacccgggaggcagaggttgcagtcagccgagatcacaccactgcactccagcctgggcgacagagcaagactccatctcaaaaaaaaaaaaacaaaaaaaaaaaacaaaactctgtgggcgtctgaaggtttaaaagttttgtccttacctacaaggctgtgttttaccttgtttaccaaattcattgtccatttagaagttgaatatttaatagcatcagggccttagctattaggaagttttctttaaagaacaaagaggttagaagctcattttccacatggtgctttcaaatatgccacatattaaataggttctactttgaacttaactttgcaggtggcaaaatcagttcagctttcaatgagttgttagtcccctaattcaatgcaatttatccaaacaactgattacacagtatattcttcagagaaggtggagaaacggtgaaaagaatgagaaagggaaactgaaggaaataaattgttttggggatttgtttatttactcaaataatgacatgctgcaagctgtaagtaaggtttttgttttgttttcttatcctagtcaaaaaagaaaacttttttccagagacagattattttaattctcttctctgtttggaacacttggatgcctttgaaatagtgataaaagtgtagtgaccccttttagcccctgttgtgatctatgttggagcctgtttggtagcaaggagcagaagcatattcaagtttgcatcagaacgagggatttattatgtggctcttggaagcaaaggaaaagataagcacgagtaggcctcagtcttggtggcaccagggcactctggggaccactggaataggaggtttggaccaccaacattttgtcatttatatggctctgctcccagttcagttccatctctgtggagggttccgcttagcctatttataacaaaatgtctcatttggcttgctgtctgcatggcctgatagtcctgttttatttaagtggcaggttccctgaagctgctattaaaacttctactttaagaggaatagcacaattgctacagcctaaaaatcaggtgaaaggtcagtgtggacactaccccaagctaaccaaggtaataactctgaaagtttcagctgagaggatcccataaattttgggcctgttgctgaatacaaatttaaactccttctgccaacacatattaccttaaacatagccaatttgaatttcatctgctattggctgcccaaacttctatgaaggccatctggggctccttaaagtcctttatggttttaaccaaatggtgttatcattaaacttggccaacttgctgtcattttcactttcaagtcattaataaatacatctgtccaataacatgagcctataaatagggcccagagttggtccctgttgaccttcacattgtgattttctttctcatcatctaatcaatctgtgaccatatgtggaccctcggtcaagtcttttaaggaaaagcttgtacacattgtagtctcctcatgacaggagcaatgagttattgaggagtcagagcctgaagccaggtaagtaaatgtagctattaatttgatattcaaaatagattggcttcatatgttatttttgaccactggggcagttgtgtgctctgtgagaggtcagcatcataaaggaaaagcctcttaatgtaaagtatgagaaataattgaaagaaggtgtaactaatgacacatctgagtagcgttataattgaatttgtagccatttgatagagttaagattgttgagttcttcactgggaaaactaacaaattaactatggactgcaaatagttggttagtttattgattattgctgtaattactgactgagctacatataatagggtatgcttgcagtattgacaacaggaatttgaaaattttatcattagtatgaaaaaaacagcatgagtattccttataagtgaaatactgtaccaattatgttgtctgttaggcatgctaaggagagatttgagaaactctcctgttatagatgtatggaagaataataagtaggcctggtatctcctctgtacgtgagacttgctgctgaataagttggaaggtatgaccaatgagagtcgttactatgtctatatcagttcctctctggattcttcctgtaaacatttgtgccctgtctgtaatgtgctaggcactatatggcagtgatttctcaggtttttgaaggcatagtcctttttgaaaatctgtaggaagttgtttatttttttcccccagaaaattcacataatgcagcatttcaccagcttcaaggatctcctaaagcccatatagatcccaggttaatacctctggcataagaggaaataaaatatacaaggcatggttcctgcccttgttgagcttccaaaagagaaacagtgttccccacaatacctgtttactttattatttatagtactgtagtaattgaggggaagggaggggatactgactcaacctcaataaaccagttaaattctaccactgtactttgtccagatatctcagtcgccttgttttatggtttctgtgtcaccctattgttgcgaacatgtttcttctatgtactcttacttggaaatgagagattcaaggcaccatttcctatttcaagattttttttttcaagtactttttaagaaggtttcccatataccagctcctttaattttgatcttcttaacatctttataagatcagcaaggcaggttttttccccatttttacagcagaggatacagaggcataaacaattgtgtgcctttcttgaggtcacacagctagtcaatagagagctggggcctgaggtcactcactcgctggtttgtttcctcattcatccaatcagtttttcatgcagcaaatgtttattggatagcagttctctggccaagcactatgcaaggtggtgggggtgcagtgagcgtacagttcatgccctccaggagctcatggtccagtcagggagattaacaaaaaaggaaacagagttcagtgtgggaagacaagaaaaactcataattaccaagcggagtgataaatgatataatacacctaagcattaggtgctccatgagcacaagaagtgtctaatctagctttggggaccaaaaaggcttcctgaagagggcagtgtccaggtggagtaagttaggacaaggggactaggaaggatgtttggggcagaaagaacagtgtgtttaaagaatgcctggtgagtcagtaggagctgcctgtgattcagtctgtatggacagtgacgggggagagggtgggagatggggcttggaggaaggtgggttagaccatggagggccttagcccagggaagtgacatgatcatatctcatattgtcagaggcatttgagccatagcaactctgttagtctgttttcatactgttatcggaaaggggtcccaatccagaccctaagagagagttcttggatcttgtgcaagaaagaattcagagtgagtccacagtgcaaagtgaaagtaagtttattaagaaagtaaagtggtgaaagaatagctactcactccatagagtaggacgttcccgaaagtaggaggatgaatgtgcccaccctacgtatgatgtttgtttatgtataggataaaaaaggatcatggggagatgtgctctgctacaagggtttgtgataaaggattcattttcttaattactatattttgcaagaattgatattattattattatttttttttttgagatggagtcttgctctgttgcccaggctggagtgcagtggttcgatcttggctcactgcaaactcacctctcgggttcaagtgattctcctgcctcaacctcctgagtagctgggactacaggcacctgctaccacgcccagctaagttttgtatttttagtagagacgggttttcacgtattggccaggctggtctcaaactcctgaccttgtgatctgcctgcctcggcctgccaaagtgctgggattacaggcgtgagccaccgtgcctggcctgatattattttgtttaaagcaaaattaggaatgcttctgttttcaagatattagggtatcaggacattcctgaatctgggtatgtttagtaaacgttatcaatctgttcccttaatcataaatagctagagcctaggaatacctaacttcctgggaatgtagcccgggaagtcccagcctcatttttcctagccctcactcaagatggagttgctctggttcaaatgcctctaacaacattgctataaagagctatttgagactgggtaatttataaagaaaagaggtttaattgacacagttctgcatggctggggaggcctcaggaaacttataatcatggcagaagacaaaggggaagcaagtactttcttcacagggtggcaggagagacagttgggtagagggtggggcgggagttgccacacacttttaaaccatcagatctcgtgagaatccactcactatcatgagaacagcaagggggaaatccacccccatgatccagtcatctctcacaggacccctcctccaattaaacatgagatttgtgggcggggacacaaatccaaaccatatcagactccatcttgaatagaagctgggtaaaatgaggctgcgacctgctgggccgcagccccaggaagtcaggcattcttagttacaggatgtttagagttaagggaacaggttaatagcatttaccaaacagattcaggacttaacagaccaaggaaatgtcctgatgtcctgatatcttaagaacaaaagcattctgagttttgctttaaagataatatctttaaataataatatcttcttgtggaagacagtagttacacaaagatgaataatcctgtgtcaccagccttgtagtgcagcgcatctcctccatatggttttttgctttgttattttacatataaacaaacattgtacataaggtagatgtgttcctcctcttgcttttgggaacacccagctctgactgggtttattggtggagccattcttttattcctttactttcttaataaacttgctttcactttactctgtagaattaccccaaattctttctggcacgacatccaagaaccatctcttggggtatggataaggatccctttctgataacagtatttctcaagagtggcttggggtagagaatttatgaagcgtggaagccacttagggggctgttccttgtgaaagacaatggtggtcactggactggtgagaagttaacagatttgagaagtggggaggatgtcaagttaataaaatttagtaggctgggcatagtggttcatgcctgtaatcccagcactttgggaggccaaggtgggtggatcacgtgaggtcaggagtttgagaccagcttggccaacatggtgaaaccccatctctactaaaaatacaaaaattagctgggcatggtggtgggcgcctgtagtatcagctactcgggaggctgaggcaggagaatcacttgaacccaggaggcggaagttgtattgagccaggatcgcaccattgcactccagcctgggtgacagagcaagactccatctcaaaaaaacaaaataaggccaggtgctgtggctcacatctgtaatcccagcactttgggaggccgaggtgggcgaatcacgaagtaaagagatcgagaccattctggccaacatggggaaaccccgtctctactaaaaatacaaaaattagctgggcgtggtgtcgggcgcctgtagtcccagctactcaggaggctgagacaggagaatcatttgaacctgggaggcggatgttgcactgagccgagatcgtaccgctgcactccagcctgggcgacagagtgagactccatctcaaaaaataataataaaaataaaacaaaataaaataaaatttagtggttaaatacgggggagaagagaagagagatggtttggattacttccagatttctggtttgggaaacagggtcatagtgatggtatttcctgagaccataaacccaggcagcagaagacaggtctagggtctgataggggataggagaggaaatcagttttggacctgttgaattggaggaggctctgcacaatcaactggttatgtttcagaacttaggagagaaatctgggctggaaataaagatttgtgattcatcagctcctaattagtctcagtgattcctctggtagttgaaactttgaagtggctaaagtaactcaaggagagtgtaaaatgagaaggctaatgaaaaacagtgggggaaatcctgcatttaaaggagagatggggtaataaccacttacaggaaaccgaatggagtggttggagaagtaggaaaacccatggaggtggcggggcgggggagggcagtgggggagtggttgttgccaaagaaagagccagaggtcacctaggtcacccatcagcacagatgtcttcacactgcttcgccagcctctgaaagatcagaggatataacctaacctgcacagggtgtgagcgaagccacagctctccaccagctcagcagtctaccaggtaaccctacctatttaggtaaatgttttgaggtatgagaaatatgagataacctacttcttaacttgtaagcaataaatatacgttttatgccctgagtgcatggcatggcctagaatgaaaggagtaatttttttgtttgtttgtttactgataaaccatttgcttcatctgttaaatagaggtgatgatacttatagaataggataggattgtaaaaaactaagtgaataaatgtagatatgtagtgctgagcctaacacacataggtatccaatgagtgagggttagttctctccctctatctctatctctctatctctgtctctgttttctcttctttttttctttctttctttctttctttctttcttttttttttttttttaagatggagtcttgctgtgtcgcccaggctggagtgcaatggcacgatctcggctcactgcaacctctgcctcctgggttcaagcaattctgtctcagcctcctgagtagctgggattacaggtgcacaccaccacgcctggctaatttttatatttttagtagagacaggatttaaccatgttggccaggctggtcttgaactcctgatctcaggtgatctgcctgccttggccttccaaagtgctgggattacaggcatgagccactgcttccatccttctctctttcttaatagaaaatttgtgcctcataaacttaaactgtgctgttttggaactcaagttttttaaaaaatatggcagatttccatgaagaaaaaaatgtaattattgattgaattgtgccattagcattagaattagatttataacaaatatgaacactgtagtaaacttgcaaacaaaacaaagcaaaaaattgtacttgttatccccttgttgaatctggccctctgtttcaaattaattagatttttggtaactatgctaaactttgtcacatccttattaaaatgactgaagaattttgaagaacagctcagagggactctgaaactaatctgagtctagtactggagattccattagcaattgcaaagctgattgatcttttacccagttagcttattgattatcgctgcagttactgcatgtaacggattatgcaaggggtaacaggagaaaacacattttataattgctgctgatgtattcagtttggacacaatatttcatactctatataattatttctgcatttttaaatgctgcaacacttctaagatagaaagtttgcttaatattgtttcaatatgaggaggtgtacttttaaatttcttaactaataatgcattacagtttaccaagtgccttcactaattttattgctgcagtttaatttttgagcctcacagtaaccctatatatatatattttttttttttttttgagacggagtctcgctctgtcgcccaggccggactgcggactgcagtggcgcaatctcggctcactgcaagctccgcttcccgggttcacgccattctcctgcctcagcctcccgagtagctgggactacaggcgcccgccaccgcgcccggctaattttttgtatttttagtagagacggggtttcaccttgttagccgggatggtctcgatctcctgacctcatgatccacccgcctcggcctcccaaagtgctgggattacaggcgtgagccaccgtgcccggccagtaaccctatatattagggtaaatatttttatgctcatttggaggaaactgatgtttaataaagttaaatgtcttcctgaaggctacacaagttaatgagtggcagacttagaattcaaccccatttcaatcagtaaatgtttattaaacacctactatgtgcagagctttgtgttagggctaataaatgccaggataagattatagacctgaagatgaagttatttggataacttgaagtaatattatgaaggttactttgttacatttctgtccaagctattatgttcagtatcttagtgtacaaagtttaggggtgtttttttggtcgttgctgtttgtttctttgtttttttcttttcttttggttttggtcatttctgcttattttatcactatttagaacaaaattggagagaatccctttaaaggaagagtatatagaaatgacactaatagatccagatctaaaaacaatttgctggccgtgtgcagtggctcacgcctgtaatcccagcactttgggaggccaaggcaggtggatcacctgaggtcaggagtttgagaccagcctggccaacatggtgaaaccccatctctactaaaaatacaaaaattagccgggccagtggtgggtgcctgtaatcccagctacttgggaggctgaggcaggagaattgcttgaacctgggaggtgtaggttgcagtgggccaagattgtgccactgtactctagcctgggtgacagagcaagactctgtctcaaaaaaaaagaaaaccccaatttgttttgcagtttattacttgctgtcttctctgttttcccatgtgagcctcacagctatcctctgggtagagcccgtcttgattttacaaatgagtaacatgaggcacagtgagcattttgtcatggaggtcacatgcttggagacaacagttagtgatggagctcctgggtttgagccctctgattcattcatgtgccttgctcatctcactgagcagcatggacctggtggccggtcaggactgctctgtgctaagaggtaccatgcatggccctgcattttatccttatcccatggggaatgctccgtaggcagtagcctgagtttctaggcctagtgccttgttggtggctgttcctcaggggccagttgtgtagggcccacactgtggttttgattacctccctttacagcatgtccttgatggtgaattactttgctatgtggaacataagcttctctattaatacagacacagatcaaatgcagtagtccagcaggagaaaatatacttggatttagaggaaatataaaaaacaaaaaacacaacctaactactcgctttagagaaactgttaagtggcatacttgatatcattactgtgactgtgttagtcgtagtacagagagatgtttatagatggcttaaaaattctcacaatgattataaaagtgtatatagtttgccagttgatttggcacagacctaaaatgaaaggaaaaccatttttatttatttattctgtgaggtaaataaataaagctggaaaacaggtcaatttcatgcatgcgaggttttatagtaggaaaaaaaagcattgcacctgttctgaccctttacatttgaggttatttgttttcaaacttgaccccaagcaccagttttagacatctctataattaacttgttagataaagcataaggatattttatttgtctttatttctaggataatggcaaagtagtaactgaaattactagcctattgtacatagcagttaattaaagaaaagcattaactataggagaacaccaccactgctgttgtcttgtatcagtacaaaaaggcagtaatttttttgacagccactgattggaaagttgcttgcagccttccagaagcaagggggtacatgctgtggatcaataaccggcaaatttcccattaaaaagaatacctgagcaatgttccaaatagccactggcatcttaattttccatggaaacctcaaatacttgtgtgccgaggacaagtcattttcggacaatttttccagactacttgttaacagttattgctgtcccaaaaggttgacagcctacatgattgatatttcatttacttgtcatcactgtttgagtaatggcgagtgctgtatttctgtggttttaaggaacagaatctcctgaaagacatttgccttagtatgtattccagagagtgtttcacatgtttatgccgtatgtatataagtttttatgtctgtagaaggagagaatcactttctttacagtttgaaaccctttggagagctgggtacacttttatcagtgtgtagctatccaacatccaccttcactttatttgttattagtgcgaacagccttagatgtattaacttgtgattcccaaaatgatgtggcattttatagctcccctttattttcaagaggaaaaaaaaaacccttgctcttgtaataattttaatgtacataaaagcaataggaagatatatgtgatatcttctaaaaaaaaacttttaaagaatgtcagcaaacaatagtaatcaaggagggatttcctaaacatatcgtatttaaataatatgcacatgtttttaatatagaaacagtgaggatgaaaaggatgttctgctctttgacagcccctcaaaacataaaatcagcagttttcattgtggatatttttccactaggagcatcactttgttatttgtcgagcattataagatgtgagagcacagaagccatctccaagttaggtggacatatgcttacaaattagcggagtggtaatcaaaccacagtaccacctactgaataatttgtgtttactaaggagtgtgaaagctttttcacttagaactttattttttgtgtgcagaattttacagtgcaatttgatccgtactaaagtgtttataaggctaaagcataaaaggtatgtttgtttgaaactaggctacctttttatcatgttaatcctgtcatctttggatgggtcatattttgtttgctatttccacagtctctgtgatttcgatttccattatctgtgcattttatacacaaattgaataatgtttgattaactggcatgtaggtccaagcccaatgtgaagcttcttcattttgctttgcaaaatccagggaaaaagagcaagaggcaatttgggaaattccactaaaatgctttatgtgtcgtctaaatatatatcattttcaaatatttcttaaatactaatataaagtcttaatcaacacttttactcttaaagataaatgccagggtgaaggctaacacactggactttcaatcctaaatattcactatagtcattttgatgtgccagtaggggaaaagtattctcaaggctgatatgtatataccagcaatttacaaaagtactgtgaattaaacaacccataagtgtctgttccagtattcatacattactgagtgatctctttctataatctctttgcagtattattccacagtaatggaacagcaagtaaatggacagttaatagagcctctgcagatatttccaagaggtaatgttgagcaaattctaatcaacaatgattatttcagtaaactgtttcatcaacagttatgtttccaaaggtttaaatgcacataacatgatgtttagctcttaattcgaaaaacaaaagaagtattcattatcgtggggattgcaggctatattatagttatggcagataaaatatctaatttactagagtaaattaaactaactagattgttttttgtttttgaagtacatacttacattagcttaaagaactcttttgggggtccacatggtttctaaagcaaggcaaatgaatgactttaattctggatatttataaattgtggctcatgatggtggccaaagctgctattgaggagaaagctttcagttagcacagaagcgaagatttactgaggtgttaggagagaaattttggtggaatgtttggtatctggttttttgaggaggtattttctaaataattgaaattcttcataaatggaaatttgattatctccaaaaatatgagctgatgagagtaagtttcagtgaatcacttggtcagataattttctttttcccttttaggtttggcagtactatccttgtatcagatatgattgttcaaccgtgtataaatgttccctcaaaatttgaataatggtgaacaagaacagtttaattatataaaccattaagtctttcacccgttatacattgccccacttggaatccatgttttctaactaatggaacagataaggaaattctctaagtaacccttctagaaataacttaattgaaataattaaaagttaaacttaccttcgttaactgatactgtacaaataatcatggtatgagttttccaattaaacattctagactttcattacctgtaactctctgaagtttgaatggctcaattaaccagtaggctcctatttgcactgataaagtctccaaaggcagctgtcttggccaacccacaagaagatctgggttcaagaataatactgctcttccagcatatgtgtgggcagcagaatcaggagtgcttagtatattactagtaacttattgaagtgctaagtaagtacagttgggctatttaaggccagtgatagtccaaaacaaggattgtgattaatccacttctgttgtacttgaagattaagcaccaaaacagaaaaaaagaaatgttgctatttctgtttattagtccaatgattaggatgtagatgatttcttttttttttttttttttttcgagacagagtctcgctctgccaccaggctggagtgcagtggtgcaatctcagctcaccgcaacctctgactccctggttcaagtgattctcctgcctcagcctcctgagtagctgggattacaggctcgtgtcaccacacccagctaatttttgtatttttagcagagacagggttttaccatgttggccaggatggtcttgatctcctgacctcatgatccactcccctcggcctcccaaagtgctgggattacaggcgtgagccaccgcgcccagccaggaggcagattatttcttaatgtttgcagtgactggagaatttgggcaagtttcaaaattctttcttcacaaggagtagtattttacaaactgaaaatttccattaatttctctattgacattatagctctgccatagaaaaccctaattgcagtatcctggagaaatatacttccaggcagggcacagtggttcatgcctgtaatctcagcactttgggaagctgaggcaggtggattgcttgagctcaagagtttgagaccagcttgggcaacatgtcaaaaccctgtctctaccaaaaaaatacaaaaattagccgggcgtggtgcacactcctgttgtcccagctacttggtgggctgaggtgggaggatggcttgagcccaagaggttgaggctacagtgagccatgtttgtgccactgtactccagcctgagtgacagagcaatacattgtctcaaaacacacacacacacacacacacacacacacttccaatgttgtgggtcttcatttgtctctaaaaaattttttttagttatcttcatccaaattctttcaagttttgtttgttttctttccttttgtgagcagtcctgtcattctcactgttcatcgcattatgcttcttcccatgataatcacaaccatttttagatgtctgctctgttaaggcattaatattgctttacgcatcatcatctgtaatcctcctgatagttctgcctattaggtattactgtttccaatttatagatgagaatattgagattcagagaggttaagtaacttcagagtcacacagcttataagtgcttactatgccctttgagtaagaatttcatttaaattataatatgattaaaatggaaaggcatatatattaaaatataattagagtgtgcatgggagtagtttggagggcttgttttggagtggagaggagtatgttatggggagaggatacttaaaggaggaaattatatgagatgtcattgtcatatgtagtcttagcataaaacccactaggctgcaataaattgttaaacatagtctttctaagccaaatttaaatatttcagaatatgagactgtctttttatttctgtgtttttttaatatgctatggtgtaattgtttctagtttttggtagtcttttgctttttgctacctgtctacatcgaatgtacattttatcatatgtagataagtgaaattatgcaaatttacataatcgacatgtagacatactgggtatatttcctgtgtctacctagttggttagaggccctcagatcttaaattttatggttaggccccatgttaaaaagaatctttagactgaacaagtaggaaggataggagaaaatgattgtttccttatttatttatttatttatttatttattttggagacagagtctcactctatcacccaggctggagtgcagtgtgtgctcactgcagcctttatgtccccaggctggagcagttctctcgcctcagctcctgagtagctggggctacaggcatgtgccaccacgctgggcatttttttttaattttttaatagcgacaaggtatcacagtgttgcccaggctggtgtcaaactcctgagctcaagcaatcctcccaccaccacttctccaagtgctgggatgaaaggcatgagccaccatgcctggccataattctgatgtaataacatgttctcctcattccaagtagcacagttgccttggatagtaactcccaggtcatggctaagtcctctacattgttaaaagatatgttaaatattaataagtgtgaacattgactagctttatagtaattcctgacccgataactttaggaaatatgaggttactgggttttttgactgctgtttacatctccagttataaaagtttgagaagtcaattgaggagtgaggcagatgttaaggttagagataagagttgatgtttgtctctgattccttggctagccactttgtttaaatgaaatttatgaatgcactgcttacttcagtggaaatattttgaagtgttgtcttaggaagtattgatggtccctcaaggaccagacgtcaaatgcatgtgactgtagttcaaaaggttaatttccattttaaggaaagaagattttgagtcttaattttaatgcattttagaaaggcaagtaaaaacattttgttatggtttagatatattttctaggaaaaataacataataaatttgagtatatttggaatatacaaaatgaaagcaactgcagtgttttgtaattattacccatatcttctccttttttttttttttttttttttttgacacagagtctcgctctgtcgcccaggctggagtgcagtggcgtgatctcagctcactgcaagctctgcctcctgggttcacaacattctcctgcctcacgacattctcctgcctcagcctcccgagtagctgggactacaggcgcccgccaccatgcccagctaattttttgtattttaggtagagacagcgtttcaccatattggccaggttggtcttgatctcttgacctcatgatcagcccacctcagcctcccaaagtgctgggattacaggcttgagccactgcacccagtcattacccacatcttattattaaacagctctatttcttgttgtcagaaacaggaaaacgacatgtacatctgagagaggagcaaaaaaaaaaaaaaaaaaaatcaaattaattcgtccccaaacaatcaatcaaaattgatggccccttaacatacaatttgtagggcactatagttttcaaatagaagcagtctataacatgggcaggaggcttttgtatttttaacatttgttgaagaagcatttgctgaattggaaaagtactaacctgtaactcaagatggtgtcaggaaattaatattcttttttcctggcactgccttatctctaggactaaatcttagcatatgtcaagatttgcaagaaatgtaataaaattagttatatatctgtattttaatacatttgactgcttatggctgtgcaaagtagtattcaaactagaatgttccatcgtagaatccctagcaatctttttggcattaaaacatccttttctcaccccgcttgctcacaaaaaaatcccttagctcttttcaaagtagtttaagtgatagcagatatacaatgtaatagaatgaggacagattgcagaaatttgaattatgaaaggaatctaatcattttagctcagttaacttgatttttatatgttttaagcagaaattggaatttatatgaggtggtgtcagaaagctctttgcatttataaatgctcactcctgcaagttaaaaccctggttcataattcccactttgggtcttgggagccacttttcaatcatttctctctgctaattttggtgtcaccctcatttctttttaaacgattcattttgagcaaatttgtaaatggccctgatgtgttctacaatttagtcaattactgtttcagcctgcaagcctcctggggaacggaacatacatggcctgaaggtacgaatttcaataattgtttcagtaaagttagatggatttgtaatgctgtgttccacttattgaaatgtcaaataaaactgcactttctcaagctctgacaagcgatccttttattttttttaaatgggaggtggagggggattcatctgtagtatttgctcagtatgtgtatatatttgcatactgggggtttggtactgtattttcaattatttggaattgttttgttggtcagtgtcttcaggataatcctaggtgctggtatctacaaagattttagtaagaatatagacttcatttcagtgattaattaagcacataagcatattgcacatggaataccctctcttgacatatttatgctagaaacatatatctagttaatgtcttttcattctgtgtattttgaattctggatttctgtttagggcttcacatctgaaagaaaagctggcttttgtattaggctcaaatatttcataattaattatttggacctcattttttagtgaataagaaacattctacatacagtgttctgcttggttgcagagctggaaggatataacttgaggttcactactaacccctgggtatattcttaatgtactttttgaacatactgtttttatatgtattctagacagtgagttggattttcacactgtttatgtctcctttttcatcactgtttaagtatttaatggaataatgacaggaatagaatattatgtaatgtatgggttatacggttttgtaacctatatactgaatagactccaactgtgggtttgtctagcaacaagctaattaaccttcatagtgaaatgagaaatttgtggcaaattataggttaattagaactgtgtcctcagaacacaagactgatcaagattctttctttacttataggtgaatactcgggccggaccctctcaacacagcagcccagcagtctcagattcacttccaagcaataggtgcgagcgagcaagtaaagtgtgcccttgatgtgatttatctacagagttggggtggggtggggaagaagctagaaagaaatttgaccagttagataacctagctacgtattgaccaaagagaaaggacctcatatggaaagatgaatgtttagatttagactgggtgctgagaaggctctctggggagagtgacgtttctgttttgacctgaagaagcagagaagggcgtttcagacggagggaagagggtaggtgaaggccctgaggtggagaaggagctcagcatgtttgtgagtaggccagtttggcacagggaggggtgctgggttggggaagggatttggagagaggagatgagagagcaataggagtgataggagctaaggaggtagacaggacttatcatgcggggcctcgtaggccctgtaatgtttgaattttccttttggtgcactggctagcagttagagggcttttagtaggagagggacatggccagccctgtgtttttaaaagatcctctgcctgtggtgtggcgaatgagcagaagctcccatctaatcctgccctcctttgatgtttgacttcctactccttgccaaatggtcatcaaatctcttactgaacatccctgtcggaggaatgcactttatcagccaacgcagctccttcccttttttacttggctacatctcagaaggctcttttttgtgagctgagatttgtctttctatagcgcccactcataacgttttagttaagccctcagaacgtggttgttccctcttccaggtcaacagctcttccagttgtcttccctccaaacacagttctagattttctgtctcagtaaattctcccacatccagtccattgctaactccagataacttgtcagtcctccttcactgcttcctaggcctccctcagtgccacaccctgtcagtccccacacttgtgggttctaccttctgagtagctctgcgtctttctactcgccagcatccctgctgctgtgtgggtggttccagctctccagatcactgccacagcctcctgagagtctactccctccgttcttggcccattcagcccctcctccaccctgcagctggagccatcttgccagtgtacagtcctgagctgcagtcattccctgctttaaaaccttcactgctcttcatgctttcaagatgaagtgtaacctccatagcaggtgagcagtgaagagcccttcacatatgggtgctctgtgtactccagcttgctggcccacctctgtaccccatcccacctgacattccagctttgctgatgaacacatagtgccctgaatggatcactttcttctctctactgggcctgcacattttcccgttttcctgtttcttttcatccccaccttgaccttcagtctggctaaccttggttatctttgaggactaaattatcttctgagaactgtccctgattactacccatccccagtgcacaccagggacctctctaggaattcctatgatactcccttcttccttgtattgtagtagtgagcacattgtattataatcacccctgtcctccagtagattctatactatttgagggcagtgactgtagcatattcattgacaaagttccaattcccagcatgatgcttgccacatagattatagtcaatcatgtttgaatgaatgaatgcatgaatgtatgtatgaattacttgtatttcttttacatcttacctctggactaaattctcccagctctttcatcttttctgatatgacattatttctagtcccctcatccttttctcttctttggatatctcagtgtctctcttcaggtgttgtactcaagttacagttgtaacacatttaaattttaaaatgtttttattttattacttttttagagatgggatctccctctgttgtccaagttagagtgcagtggcacaatcacagctcgctgcagccttgacctcctgggctcaagtggtccttccacctcagcctcccaagtagctgggactacaggcttgcaccacaatccctgattaagtgttttttttttatttttttaaatttttttaatttttagtttgtagagacggggtctcactgtgctgcctaggctagtctcaaactcctggctcaagcaattttctcactttggcctcccaaagggttgtgattacagtcatgaaccaccacagctggcctttaaatgtttttaaaagtgatttttggatagcttaggtcaccgtgaacatgcagatgaatgaaatattgagtaaagtgagtcacagagaaattgccaggatacaattttttcttttttttttctttttaaccagacaaagttgatagccagatactagcataatgaatgaaacagtattttcctctattactctcaaagcatgggttgttttttcttttgccttaggtgaataactgtttattaaactgggtttactaatgcacatggtgttcctaggccataattactgaattcaagtcccattgccaaggcaaggcctttcctaaactacttagctttctccttctgtaaattaggatgattaaactttccatctatctactgctggtgttagaaagattgatgaagctgtattaggaatcacgttttatttcttggatgaaaggcattctataaatgcaatgaatcaaaatgttattaattcaagtttataacataatggaatatctatgtagaaaccttgcctgggctttgtttggttatttgcgtctttacaataattggaactatcaactgggagtcatttgtgggaaaactaggatctgaatgtttcccagaaaaaaatgtgtgtgtgtgtatatgtgtgtgtgtgtgtgtgtgtgtgtgtataagagatagatggacttcgagcaagatctgtaccttagaggtctgtattttagtatcctttataaattagggataataactatacctaaagtatagttattataaggattaaattaggataataagcatttagcacaatgcctagcacatggtcatcacttgataaatagcagctgctattattatgttaactggactgattttaggcagctgtgtattttttccatatatgtttcagctttcatcctattctacaaaattgttaattgccactttagtgcatcgattcttagatgtggtgggacattaaagtcaagaacccttggatgaagacatgctttataaaatctaggaaaatagggactcagtctccatagtttacatttgaccatagcaaaagtttaagatgtatttagaaagaagagtaattataacttgaagtggtaaaatgtgatcaaacttgaagtctgagattctctcaaatgtaacctattaaaggtaccaaatggaatatgtgtatttcatattaggtcttgagtcctttctctttttttccttttcatttcttcctttcttgctccttccttcctccctctctccctccctccctctctctccctccctctctctctctctctctctctctctctctctctctctctctctctcactctctctttgtttctttttgagacagggtctcattgctgtcacccccccattctggagtgcacaattacgggtcaccacagcttcgacctcctggcctcaagtgacccgagtagctaggattacaggcacatgccgccatgcctggctaagtttttaattttttttagagatggggccctactatgttgcccaggcttgttcttgaactcctgggctcaagcgatcctccttccttggcatcccaaagtgctgggattacaggcttgagacgctgtgcttggccccttttgttttctgatgtatttatgatcttaatgtcttactgcattactactactgccaccacagtataataataaccagagcagcgaccaccatttatggaacccttagcatatgccaagtcattgggctatatttaagggtgagaagagagtggagtatatagaatacgtaagatgtgtctgtgttctcagggagctcccagactctcccctgttgggggagggtatggtaggaagaaagacatctatactgacaactagcatgggtaggtaggtaaagggctaaagtggataggttaagaatagagttggctgggtgtggtggctcatgcctgtaatcccagcattttgggaggccaaggtgggcagatcacgaggtcaggagtttgagaccagcctggccaacatggtgaaaccctgttttcgctaaaaatacaaaaattagccaggcgtgatggcatgcacctgtagtcccagctacttgggagactgaggcagaagaatcgcttgaacccaggaggcggaggttgcagtgagctgagctcacaccannnnnnnnnnnnnnnnnnnntttattattattataaaaaaaaaactggagtctcgctctacatgataggctggtgtgcagtggtgcgatcttggctcactgcaagctctgcctcctgggttcacaccattctcctgccccagcctccagctgggactacaggcgccggccaccacacccggctaattttttgtatttttagtagagacagggtttcaccgtgttagccaggatggtctcaatctcctgacctcgtgatccacctgcaccagcctcccaaagtgctgggattacaggcatgagcaccgcgccggccccttaacaggctttaaatctcaaatagaacattgctgggggaaggtgctattttaaatgctactctactagtcaggtagatattcacgggtataactcattataaagctagacgacttaagagctccccttgactaccatttttcttcaataaggactttcacgccaggggtggtggctcccgcctgtaatcccagcactttgggaggccgaggcgggcagatcacctgaggtcgggagtttgagaccagcctgaccaacatggagaaacccccagcttactaaaaatacaaaattagccaggcatggtggcacatgcctataatcccaggtactctggagactgaggcaggagaatcgcttgaacctgggaggtggaggttgtggtgagccgagatcgcaccattgtactttgcactccagtctgggcaacaagagtgaaactacgtctcaaaaaaaaaaaaaaaaaaaaaaggactttcactaaattcatccatatgagtgttaacatagtcatatatgttcagaaaacactttaatacttcctaaataactctgggagctgagtctcatacccataggaaaggaaaaccagctaaaatttattaattttatttgtaaaaacacacctgctatggacaagacacagtgctagattttttgtaatatttaatttttctggttaccctataaaattggtattttccccattttacagaaagaggaaattgaggttcagagaggataagtaacttgtcccagatcacacagctagtgaataccaggatttatttgtactacatatttgcttcccaggaagctgaattataacttttaactgtgtaagagaccaggacttaaattatctattttgtcttttgaagttctataatctttatttgctgtgaatattagtgcttagcagatgacattgtccacatgaaattgcctctgaaaggctatctaaaggcagtagaactaatgaccataaaaatgtcactgaagtagttcataagatattgtagcttcatcttgactgtaggcttctttattgctttcgattactaacagggttttagtctctttatttgataccttttgcatttggccagttacttttgaaaaaaatttacattgggagaaggatgtgaagaatatgctcaatccctatatgtaaaagcaaaggtgtatttcagtctggaattttcagtggtgttcagaggtgttgatgatcttgccactaaaaattatctttccttttcagcttaaagaagtcttctgctgaactgaaaaaaatactagccaatggccaggtaggtattattatatattaagattttcacataataataacatattaccgtccagtttttgtatccataagcttattaaacagataaagagtctgtgagtttcctgtcataaatgaataacatggcttaatttgattggcagaacaatttgcagcccgtttttcaaactgtgctaatgggtttcactcccagcagattgaagtaccatgcacacaccctgctgccatctcagtttttaaaaagttaatcagttctgaacaagtgtgtcaactcgtgggctgttgaaatggccctgcattctgaggtgactgtttctttcattatctttggggagaaaaggaaaaaccattactttctcaccttagctccttcttttgtcctgaaactaacactggctttttagggaggcagagtgacagcagacctttggcatataaaattcctggccttcaggagaccttagtttgcctagtagactggccatctaaagctgaatgacctaacccagccagtgagggacaaacgagccttcaggccagttatttcttactaattttgattcaagtaaatggacacatctgaaatagtagagtgcttttaaacatacactggtaaattaagctacctacagggtcctcgattcttcagtagcaacataaatgcgttttaatgtttgttatagtggaagccctttgatagccttggaggcaggcgcctgtccattgcgatcaagcctgcctattaggctgtattgactgagacatctgtgtcactgcaaataaaagactcttattgattttcttaactgctgttcacttcccgtccatgtttcgaaggctgaaatcttaattatctcagatgcttattcagtgccttcacacactgacctctccaagcctcactggcatttcatgaatcaagtacttgtagtggagcatgtcaagaagacaaagccaggtcctcatgcctgtcctttaatatcacctgtaacattgtggcctaatagatgtgcatgccttaaaacagtgctgtatggtaatgcttctggaggccttgcttatttagcacacaattccttgaatacagttagaagaaatgaagttgatctgcttctgacatctgattgccatccagagtatgtgaattctagtccttaaatatcctatatacagctaaggagaatctagtgtggtgtatgtataatctttgtagtctcaacattttagatagtatttatcgaatacctttaactttcagcagccaaaggtttgtttagattgaggtccacatctgtatcacctcagtgccttatattttgttagaaccagcatatataaacaaaatctgactaaaagcaaaaatattgagcctaggatatttatgtatcttcaacatgcttgcattctagttactaattgtaatttatgtatgagtcactgtgttcttcagctggaaaatatatttcaaaattgacataaattaagaagctttaactacatttgtccagcccagacaatggaaaataacctgtcatagactcttctttcaaaaatgaaaaacagttttttccactgcaaaaaataagcattttcataatgttttgacaaaaataagcagtctcataatgttttgacagtaagcctagtaccatagatatcttagtggcttcagttatgaggttctctatatggtgggaggttgtcctggcaaggatttttgacacttaaatgtttattgctttcccttgggaatgtgataacctcatattaaataatatggctttttttttctttataaggattagcctttcttacatttacttgcactcaaaaaattccctcaaaaaccaaaaaaacccacctttggaagctttcaaaatgtctccttctaattccttaattcctcagtgctataggataactaaacagtgagtgaaattgcattgcagtgaggtactgtgcacagttgtaggcatcaataaatttctgggctgaacactgacaccacttgatagggaagataaaagtcacatttaatgatactttaacacttgagcatagttttttattttagtggtttatgctctcaagcattaataatgatttgcctttccactagcctccacttagatttaataaggaattcatattaatcattaaaagaaagggacatgattcttcaagataatcaaatattgacaagttagaaatagctttctgcctgggttcattgatataggttatgtgatataaatatttatttcttttctgtcactcagagtaaatgccaccaattgattcagcattgatatagtgtcaacagttcataagaaacatttgactggcctgtgttttccgattagtctctgctctataaagtgggatttactaaatctctccaattgtctgctcatagagtgtgactgctttctgaaaccattattgcttcgatttgtgaagcaaaggtctagtgatgggactagtttctgtcagacctttacatataaaataaggattaattgagcatttttattttaatgatttataagcgataggtactgattcttcttaacacagacaataaacaaagaatattttctgtgttgatccataattgaattccatttcattttttccattaatttcattaatatattaaatcaagcactttaaaaaaagtttaacacttagtctttggaatggagacattgttttcctgttatcactttatgttggagtaattccatttttccagcttaaaaaaataaatcagaagatatttttggcaagttttattgagagctataaatcagtctcactgatgtgttttctggatttgtttttcctacttcagttatagtgtggcatcatctgtttaacattggcccttgatttgaaactcattagaaatagcccaaagtgtcaatttgaagaatttaaaaagtgcacagttactccaaagatatgtgagtttggcctttgcatctctaaagttattttttcttttttttttttgttttttagattttataggagagggtggcagtattttcctattcctgataaatcaagtataaatctactcagatcagatctagaactaattctggtccagctgcatcttttggctgttattttgataacttcaaaaagcctctagaaaaactttttgtatttggctgggcgtggtggctcatgcctgtaatcccagcactttaggaggcccacttgaggccaggagtttgagaccagcctggccaacatggtgaaacctcttctctactaaaaatacaaaaaatttgctgggtgtggcggcccatgcccagctacttaggtggctgaggcataagaatagcttgaacccaggaggcagaggttgcggtgagccaagactgcaccactgcactccagcctgggcaacagagcaagactctgtctcaaaaaaaacccaacaacaacaggaaaacctttttgtatatagaaaaaaaagggagggggaatatatatctactgtaaaatttaaaaagtttaaaaactgtatcattactagtatatgtaactcttagattcttacagttcatcttggattgcatatgaagagtgaaacataaatgaggctgtgtatgtaagtccaaactacacaacagccctcctttacccacacaaacccaacctgactctgcccatgggttgttgctgtctctgtttcttttatggcccctgcctctctttcagcaggagcagagctcagtgccagtcatttctctaaggtcatttgctatcttggcagttgacatgtaattgtaactcctgtggctttttcttcctcctccttcacatctattattctgccttttatttacttttttagtcaaaacaaggaacctggactgtatttaaaaactacttggaattggccgggcatggtggctcacgcctgtaatcccagcactttgggaggccgagtcgggcggatcacgaggtcaggagatcaagaccatcctggctaacatggtgaaaccccatctctattaaaaaaatacaattagctgggcatggtggtgggcgcctgtagtcccagctactcaggaggctaaggcaggagaatggcgtgaacccgggaggcggagcttgcagtgagccgagatcacgtcactgcactccagcctgggccacagtgtgagatctgtctcaaaaaaagaaaaaaaaaagaaaaaaaaaaactacttggtattgttgttgaataaaaagctctccttcacctcttttcaatttaaagagctgtgtgattttaaaaacatttttcttcttaaaaactaacatcgtagctaatgaaatttcttttaacttgtgtctttcagttgattgtttaccatcctgtgggccagtggccattgataggaatgtccctccatacttaataccggagacaaactgctgagctatgatgttgaactggagtatactgaaagactgagtttttgactagctatgtaacttaagtaaagtggactaaatggtcttagaatgctgtaaatttctgtgattttttaaatgatacttgatcccaactataatatttaaatacaatattccataagcttctaaatagcactttcttatataatgaacactcttcctatgcttcattttgaaaagtcaaattaatatccttatctaaatgaaaaaagcagaaatactactggttgattgtagatccctttaatgattttttcatagttaagatcaattaaattagcccatttgataagagatatgaagttctaaaaatattttttgtaatcaattcttgggctctgctttgtttttcccatcccccccaaatttttttacatgaggagtatttgtacagcatataaaaattagaaaatacaaataagcaaaaagaaaaagaatctgatattttttaatattaaaacacagtcaggccgggcgtggtcgctcatgcttgtaatcctagcacttttgggaggctgaggcaggctgatcacctgaggtcaggagttcgagaccagcccggataacatggtgaaaccccatctctactaaaagtacaaaaattagccgggcatggtggcgtgtgcctgtaatcccagctgctcgggaggctgaggcaggagaatcatttgaacttgagatgtggagtttgcagtgagccaagttcacaccactatacttcagcctgggtgacagagtgagacttcatctccaaaaaaaaaaaactaaaactaaaactaaaaaactgtcaatcagttcacaggccaaaggtttgcataactttaaaacattgtagaaagacattataggaacacgttgctcactttttatagatactaagtgacatggttccagaacttgctcttcaaaaccatttttatctttatgagactcttgcaatcctcctggttatctgaaggattccatatttgtcttgattttttccattcttgaatttgtttagacagtgttaattaatgcacatgcacatacacttgaaataaacattctccctctcccctcctcctccctgcactccttccccgcctgtgccctgacagtgttggatgcttactactccttgttaggttggagtgctgggaatgtggattgggtagcttcttcccttctcttttccctgtagtggatgtaagtggtaaaaagactatgatgtcagaattataccatttgaacatgctcagagacatgccatacctacccctttgcctatgaagtggtggaggggatatgactgcagactgtggcccctccagagtgtagactctatctactacatagcaacttcctgcttactcttaaaccttagtgccacaaatgcagaatttgtgtacttgagtgagtgaaatgtctctcgtagaaatttatgtcaagccatgatgagagtgtagcttgttagttaatagtacaaatcaggttgttacggacatgtttagattacttagagaaatgttctaagggaattagccccagtggcctatttgtgcccaccaatggatactgctatttacgtttccttcattgatcaaagtaaaccaaacagcaactctgctagtttagcatctcgtcactttatgtgctacttttcttcatgctgctttaaaatttatcattcggtccagaataatgagattttattttgtttatgccacaccttttatacagcttaaaatattttttttctgtattagtagtataaaggtagtgatgaacagaattcccctcaaataggaaaatagttgccaattgttctggcatgtctttcattacttcactgaccctaaatataataattagctgattgtaaagggcatcagtctggttgtactacaattaaattgggtgctggattggcctttacacattaatctgtcaatattcttttaaggattggtaaaatggcttggaaaagaagctgtttctgttacctgcattgtactcctaattatcacagctctctgaagcttcaacttcagaaatgtgtagaaggaaaatatttcccttggtaaatgaacccttgctttattcaattggtggaagtttagagtagagcaaaatatttaaagctttgctatactggtctgagagcaaactattttttttccaagtgatattgaattaaaaactccatccattttctgcccatgcaaggcagtgcaattccctggaaattgattttttttttttttttcagggcttgcagtggctttccccaagctttagctatatggaaaagaacacctttattaaatccacttagtgaataaagttggcagttaatttttaagcatctggaccagtgtgtagaaaattactgaatgcatcaaataaagtctgactagtcttaaagtcatttgataaataattgtatagggagctctctaaactctaaaacattattttatgggcacctactattcataatacaaatgagagtagttatttgtggtataataggttttatagaaccttgaaaaacatgcaaacttatatataaagttacgaaaatgactttaataaaaattacatgcctatgtatttttcctttatgtattataatattcgactatatgtgcatcttaagtgcattgatttcgtgcttttccatcttcataatatgatttctgcctaattattgctgtatactagtttgttatttgcaaagaaaagctatatctactctaggaaaatcataaacattatttagtttgttaaatgttaattatgggggtcatctgaggagttttctagggctgatttatttacagatcatgcattagattactgagtgtgtgtgtgtattgtcttcctaagtttgactttggttatgtgcagtgctctttggcattggttatatgcagtactggagactgttttcttatcagtatctctgacctgacccttttgagctatgttgtatcattccattttgacaccttttatcaaactttaatgaaatgacccaggcaaacaaattgtcattaaactttccatcacttcgtcccttggtatcgtcttttataaattggacagcaaacgttgtattgatcttctcgtttttgcagctgaacttgaaatgacccagactgcttgttgtttatggcccagagttgcttttccttgacatttccatccacagcatgacaccctttttgtttttctttctttcttgtggagatgaatgaacaagacatacgatatcgggacactcttggtcatggcaacggaggcacagtctacaagtgagtagtcaattttgtttaaactttctatccgcttttccaaatactgagtatccaagttctctgtggcaaagatttttaaatgaccactaacacttagattttatttccatatttgactccaaaattctgcaagacatctattttctcaagaattgcctggaaagtgcatttatattgcctttttaatatttccgagtctgcaactctcctgggtgtgtagttaatagtccaccattagtaagtgtacctttaactggcctgaagtttaatgcatttttttcctttgctttttaacactattattattattttttaacttgctagtaccctacgctagtcccctgcctgtttacagttatgcccagtggaagccagaccttataaataccattgctttgccctgtgtcaacactataagttattaaaaagccttcttcctgttgtattttcttctctcctcaccctactcccctgagataatttctacacattgatgaatatgttaagttataaagttctcccaaattccagttgcagtgatcttaccccaaaggaatgttcattttcatcttaaaaaatgctagccataaaaaatagttctccgacagggaggtcttctcatgcagtagtgcaaagtttaaactacataatgtaatatctggtacttaatagtctgcaatggtgtatgaaaaatattccactaggaattaaaaaatccatactctgtaagaaagccctgagggaataataaaactttcctccagagagctggttttccatgtatacactaatcctgcatcacattatggttgtgatattagatcacaaccacagatactttaacattgatattaatatgtatttccagagttgtaaaataattaacttattttctaattggttacccatgttcttagaattttaagttctgactaaccacatgaatacacataaaaattgccctattctatgaccatgaaggttcacatcctaaaaatcccagaacatcccctactcattgatgcagccttggtatagaatttgatttctcaggcttagaagctcttttgaagtaatctgatccagtcacccattcagggcttcagtgccctttgcagatacagccaagatgtgagtcctttctcctgaatatagtcctttaagaacttatgttcacatgtttggattgttttttcctgcagatgactgagtattgtgaacagttggtctgaaaatgaagttcttccactatgataattcagagaaataaataataacatgtttcttacatgttccttgggccttgggcctggcccttaaaattgaggtccaatgtgtctaatgatttttgcggctactattctctttccctggatcatactagcgttccttcccacgcaacctccactataaacggtatcttttcatcttagtcttctcttccttacgatctgacttagatttttcctgtgttctgaaggtacttaagttcaggtacccatagaaaggaaagaggaagaaggaacatgtatactctgatttgcttctattgagttccctggagggagcacttttcaaagcttgaacctttcttcttaatgcctttatgctgatagccaaatataataaaacaggaaagatttctggcaactctttgtattccttttatttgcttcaaatggaattaaaaaatgtttatttagactcctaacctacttatctgtgttatttcaccaaacctttagttttatattaattgaaggtctattgtgaatttattttcctagcttatttctagaagggaagaagcataagaccatgaaaccccagcagaatttttacgagacataatattctagatgttgacattttaatcctttattttaaaacataggtttgtttgtttgttggttggtttgtttattttgagatggagtctcgctctgttgcccaggctggagtgcagtggcacgatctcagctcagtgcaacctctgcctcccaggattctcctgcctcagcctcccaagcagttgggattacaggcgtacgccaccatgcccagctaatttttgtatttttagtagagatggggtttcactatattggccagactggtctcgagctcctgacctcgtgattcacctgccttggcctcccaaagtgctgggattacaggagtgagccaccagacctggccaggtttattttttaaaagagggagtatacagagaagtggaaaaaacatgcccatcccccaagggaaaattacaacatgaaattatgttaatgttgtttttaaaattgttattttaaattgtggtgaaatacacataactcaagttaacattttaaccatatttaagtgtatagttagtggcattaagtacattcacattgttggcaactgttaacaccattcatccacagaactcttcgtcttgtgtaatcgaaactctgcacccattaaacagtaactcctccatcactctgttaatgttgtttttagctaagaagcatggctagaacttctcctttaattagggctactatgtcaaagggaccattcttctatatgtccttgccacaagttttttaatttgctagaatgctgtgtgtaacgttaggaatttatcctaagagctcatttagctaccgttgctaatgctcactgtgagtgttgtaagatgtaatgtttttgacaggattgcttatagatggtgaatgacagtatcctgataattttcattcttatatagtagatttcttataaaaagaaatttcatttaccttattgcctgtgtgattcttgagaggggcggtgaagataccaaattgcataaccgcttgtcattgatcattgggcatcatttttgctcaggcttcagcttgtattattgttcttatatccctggcttttagtacagtgcaaagaaatgatataatcattgataaatgaggatccactttactaaagtctctataaaactaagtgtttgatgtgttatgattgagtttcttctacactaagttcaccttaatggtgttgatgataaaaaatatggtttttcaaacagcatgattacattataggctatgctacataaactagatgaagaaaatattggaaaatccactcattggtaacaaaactgcctaataggcttattccatttttttctttaaagtgtaataaagctaataagtgcaaagcaaaagtttaataatgcagtcttattcacttcacttgatggaatgttgggaatttcaagggatattataatcgtgtaattacaatgtatatgatttaacagttgatacattttcctcctttaagtgtagatatccttcacagttgtacaatatgaaattctggccccagacatttaaaccaaatggtaatgtgaattctgtgtgctgtctcctgacgagctgtgctctatattatgagagtgacttaggcaggtaattttaagttggtatttcttggattactaatttgggctacatggaacataaaggaaataccttaaagtatggcccaagcctaggaagaagaaaagtttaggaaaagataatgaatgtattttccttgttgcctcatttcctaaagtgctgcaagttgctccaaaaaaataaattcaggaaagacacatgttctatttccctctgagagattcataatgaatttcaaaaactttgagaaagtagagaatagtatgtgttgtggttaagtgtgagggctctaagtttgaatcctgcctctgtcactaattagctacgtaacctttggcaagttatataatgtcttatgcctcagttttcccatctgcaagatggggataataatagtatctaggttgggcggggtgcggtggctcacgtctgtaatcccagcactttgggaggccgaggcaggtggatcacgaggtcaagagattgagaccatcctggccaacatagtgaaaccccgactctactaaaaatataaaaattagctgggcatggtggtgggcgcctgtagtacccagctactcgggaggctggggcaggagaatagcttgaacccgggaggtggaggttgcagtgagccgagattgtggcactgtactctagcctggcaacagaacaagaaaaaaaaattaatagtatctaggttgttgtgaggttaaatgagaagatccgtaaaaggcttagcactatgactgacacttattaaatgttaactactggtaatggtagtactaataatagaaaaattattcacattttgtacttcctaccttgacttggccatgggactcttttcttttttttttttgagacagagtctcgctctgtcgccaggctggagtgcagtggaaagatctcgtctcactgcaacctctgcctcccgggttcaagtgattctcctgcctcagcctccctagagtagctgggattacaggcatgtaccaccatgcccagctaattttctgtattttagtagggatggggtttcaccgtgttggccaggatggtctggatctcctgacgtcttgatccacctgccttggcctcccaaagtgctgggattataggcgtgaatcaccacccccagccagccatgggactctttttgataaacatctcacagaattatagttgtgttgaactaactttgagaaattctgcctttatattatacacattatacttctgtattttcttctattctgtagttgcttaatgaatcatgatatcttatgtattatcttaaatacaatgattttttaaagtttcaaagtatttttaatcctaatttattttcagattgctataggacagctgggttaagcccattttaccactgaaaaaactggggcttatcatgtggccattcagcagcaaagccagatttctatacagcatttcttttctttttgcttggtgttcttcccccaggcagtgttgtctcaaggtcaagcagagtccattttgttttcttgtgttttctcatgtacccagcacagttttaaggataaaatagacccttggtacatcttggctaaaatgagaatgaggcaagtggaggttttagtggggctctttcattggatcttcctcatatctagctactttgcgaggctgtacaattgttgtagaacattcacctagaagaaaaagaatatccacactgaggagattgatattcgaatgattaactttctttaaaatgttaaaaccttcagtgcttagtatctgttgactcactagttactgtctctttttcttgggtagtatgtcatatggaaataaaagtaattaacaggcatagttactttggaaacattgtttgattccaaagccagtctctcagactctgcttccttggcatatcatttgatggagtcactcaaactttggatctagaaatgaagtaatatttaacttttaggattaaatcatagtaagtcagttagccagcaatcactgaaagattatcttttatattattttttccttaatgccagttattcaagccaagactcatattttcagctttggggccagataatctagtctcaagatgtttgaaaactgaattttctatctccagctccttcccacaggatagagtaagagtctgatctggacttgaggtagaattttctcagtgatacaatgggtagtatatatactgccttcaaggtgttttgaaggttgaatgtataccattacttaggaattaatttgaacctatctagagacaataagaggagggaaggaattgtcattctcaaagatgctggtctctcctcctttctgttgccttatctaaaaagaggtatttgctgggcagtgggctggggatggtccttggaggtggtaactgagatcctgtggcctattaggttgtgttttgcacttgtgatttgactgtagaggccaactaaaacattaaattactgtttgggagctggaatcatattagctcattatagtaatatgatttatttaatgaaaattagaaggactgatggtcatttgtataaaatgagaaaatacataaattgtctagttaaatgctatttagtaaacagaatatttcaaaacatggaattccttaggggaaacagaatgaaaagagtccttggtggtgaaaatattgggaaccacatagtacccagaaaaccttgacttcctctttcaccaaccaacctgaaggtgtgaaacttaaagagggagcaagaggtctggacccagcttcgcttgtggctgtgttagtggccctactcctttatatatttttgcatgatgtgtatcttgtaaattaagagtagtttttaaatggttttaaaattgacctgagagctagaatgatggtttgatttattttgactttaaatttctaatcacttaaggagtcttttccttgcagccaagatcatattttaaagaagcaaacaagacatcatcctaatgcaaaattaaatatttgtatatgactggattgcattatagtatcgtgacaagcaaggatattaatgttttcagaaaatcaatgaatatttgtcaaataaaattaattatgtatgtttccttctctccttctctcagcattcattgttacaggtttgtttcatacgataatgtatattttattgattcgaatctaaggaatgaacctgagctcatggttctctgtacctttcccacctttgcttttccccacctctccatgttcctgtaacttcatacatgctcatatccattatggcaatgatgtattattggcatccagccaacatgacaggatgtcacaggtcgctgagcagagattttcagactcagtttccacccgaattaactattattgaaatagtttattgagattgaagtattgatcattttctgctaaccttggcttaagggaaggaagaagaggcagtagtgtttttgaaagacactaaatttcatttttaaaaatctcatttatttagcctttttttctttctgttttatagcctttattgttttattgcttggaaaagggtatcttggttttattttttatgatagtataattatacttcagaaatgcacttgattactatgggtaacaaaattgttctagtatattggtttggccaatattgctatacaaacaacttttcagtcaattgagtctggtaaaaatcaatacgttatggtaatatttcaagtaagaatttgctgaatctaagtgtttcaacttcatctcctctcagagaaaaaaatagttttgaagtggcaagacttctttctaatattttagtaacaattttttatttataaagacgtttaaagtccccagcaaaagtggttgtgatcaggtaaacattacattagcgcacttccgtgttgtagggtgtaagagatctaatttccatttgaatctattccctgccacaccaagaaggcataacatcagggactgacatagtgtctgtcacttttggattctggattcctgtatgtagttctgggtgctgagtttacagacatatggacagttcagagagcacccagaggagcaatggagagaataatgagggattggggaattgtgtctgttcagtcctccttcattcatctgtccagcagccaagttctgagcatgtgctgtgtggagggcgtgtcagatgttggggacagcctagcctcataaaacttgtgtctggatagatgaggaagttctgttctcaggtatgcacaggaccccacagtctggggccacctgtctgtgtgtatggtgcacagatctggggggctgaggaagaactgatggcttttagctttttcctcaggaaggatcaggaaaggcctcatggaggaactggcatttgagctgagaagtgtttgaaaggaattggctaacttttctctgagaaagagaagattaaagggctccatgacagctgacttaaagtctgaagggcatttctgtagatgaggagcaggtttgctttgtgttcttctgaatactagacacaaagggcctgtcttgaatgtctctgtgacagtcggcctttggttagagtgattaatgtactctttctactcttgttcccactgggttgtgttccctggaggagagtcatgtctaggttaccttggtgggagtcctcacagggccagcacggtgccttacctactgtaggcacttagtgagtgtttcaggaatttacctgcagaggcagattcttcacagcctaaggatggacacaatgtgttgttcattgctgggtgactctgggaagtggtgaactcctctaccttaagcagaatgatgtggctgttgttcagaactgctgagaaaagaattcccactttgacctggacatgagatgactgcacaggtgtctcccaagcctaaagtcccagaactaaattcagcattcagttaccataaaaaccttatatcaggtgttgcttggttttgtttagtctatattcatttttcactgaacatcctgtcactgtgccaaggactattccaagcatgtacagtccagttgtgaacaagataggcaaggtccctatccagaactcacactagtggggcaaacaataatcaagacaataaacactgaagtaagattatagaatctataggtctatagattctatagacctattctatagacctattctataggtctatagattctgtagacctattctataggtctatagattctgtagacctattctataggtctatagattctgtagacctattctataggtctgtagattctgtagacctattctataggtctgtagattctgtagacctattctataggtctgtagattctgtagacctattctataggtctgtagattctgtagacctattctataggtctgtagattctgtagacctattctataggtctgtagattctgtagacctattctataggtctatagaatagactttgcatattctataaaaaatgtagaagaggtgctcaggaagacctatctgaggaggtgctgtttgagctgagacctaaagacaggatggaatcagtatgggaaaatctgggagaagaaccttataggcagaagtaaccactcaggcggaagccctaagattaagataggcatgaacttgtgtaattggagtagaataagctctggggaaggtgtagagatggacagggcttgatcatgctgggtcttttagtccttagtaaatccttgctaagaaggtatgttaccctctttttacttatgagaaagataacgtttggaagggctaagtggcatgcccaagatcaagtcaagaataaaacttaggtcttctgacacctgcttcccaagccaaggtttttctgtttgccattcactctctgaatttcctaactattaacccaagttatttttggatgtaagatataaaattagtgtataaatttgaaagtcaatgatgtatcatctctaggtgttaattttagaggctttttagtagatgttaaaacgtccacttcttggctgacagttatgacaacataacttgttatttggtctaccctttgggtgtccttatttaccaaaaacttataatttaataattgaatccctggattaaatgtatggttgtgctagcaggggtggtctatttcttgatttataagacacgttacttttttatagctattttacagtatttgatgtgttcgaaaatcgtagtctcttggttggcatattgcacaagcaaatatttgtgtaccatagcatctagggtatttacttaaattgcttttttggaaaataattcactggaaagtccaaaaggcatttaccgcgtataactttctgccacagtttttttttctttgctctgtcattggttactttgatgtaggggaccatgtttctgttaaattgctgtcttactagagtgaaatatgtttaggttctgatttgtacactaacgttgaattggaggagcagtttgcaaaatttgagggggaatagcagtagagatttaggttgtgggtattaagcattaaatttttttaaaaaaacattaatttgctttttaaatgtgactttatatcatgttgtcttcttgaccctaaaatttccttacttttccttgtcagtatggcaaaaagaaagagagagtacagtggtattgctgaaagcagttaatggtttttgtcttgtgaatttaaataataaaatgaaaaatgttcacacaaaattagaacttgctttagggcacaatcaatatagcattttaacaagcttaatgtatttggaagatatgtattgtgtgaggttctcaaacatactgattctattacgacggttaactgtagcagcaaaatgtatcaatatacttagccaataaacataaaacttattaaatcataattaaattttcagaaaagttatctaaaaattatgaataaaatatattttacatggcctcagcaacaaaatatatagccaatgaaactttataagtggtggggtaaaatacatgggataaaattatagaatgaatttttaccatagacacatgtaccgagttaagtttgtgtacaccatttgtttctcctctcttttaacttcttttggaggtaattcttagtgagtatttgcagagcacaacagctggggtaactgaccgaaggggcaaatgagaagtttccctgctcctttggagtctcaagtgaaatgtttcaaagccctacctgcccttatacgtggaagatgccaagaggtactcagagtcactgtggttgcatttacatttctacagtgggcgccaatcacaagcttcatgttatggccccagctgtgtgggaatgtagctgagcacactaggtatcgtcatcctcatttgatttatgaagaaatggaaacacagataaatgaatggatttccctgaggattcagaccaagtcaaggataagatcaccactgaaacccaggcttttttaattcttagtcctttcccaatgccattcctggtaaataattacattttggctctaagaggagctagaataaacagaatatatgcaaacctaagaatttctgccagcaatctctagcagatatacttcagctgtactttgaatttttattttgtgcaccaggcacatgtatcttatagatgaccaatatgaacaaacagctgtctcccttcctccctccttccttggaacgtgtaatctctgaataactgattagctcaatgtcagaaatgtttgtgctgatctctgaacctcagtcagttcaacacatgacttcctggaaattttatctttggttttcttttttttttttttttttcactgccatgattttgtgagttagtttatgagtgtatttaaatcatttctggaatctaaatattttggacttgctggtctttataaggaagttagtttccctcctctcacatagacctctttctgctttctcctatctatcatattttaagagtatatgtgacaccgttaagttttaatcttctaaatggattggagaataacaccttcccttgactaacctcaaaggatttttaaaaacagaatgttgcctaatttttgagggagaatgttctaacacagtttatatatttttgtaactcaacaaaggtatctcataaagaacattggtggaattgggttttaaagtccaaatactttccttctgttgtccagaacatagctcctcaacctagaggcatagtgtcatgtgcagtgaagtcactcaaattccttcttattattggtttgaagatgactgtccctggatggtataagatatgatggtagtttgtgtcgttcagtttttacgttaaaggaaaaagtctctcctggtttcttttgaccctagtcatgatatgcccatttcatgaagtcttttatgcacaaaagtgcacaaaatgaagataaagtgcctctctccagcctgacaaaagccatttctttgcagaatggtagctgcagcgaaagtaaataaatgaatggacagcaatcacagcctagttgatgaaactgttcaattaaagcacaggcatttacatggtgtaatttccctaaattgccaatgagcccctttagacacaaccagtgttcaaattgatttcagcattgattttggctgaagctgataaatttctgcttgttagttaaagtaattttgcagaagactttgtactgcagtattgaagtgttcatttagctgatagttaggagttatttacagaggcctctactgttgttctgagatgggacaattccccaatcatcttttacttttaatttttcaggcttcagtataccaatcaataggtgattgaaactgattaaaacttatccaaccagctgcctatggcagtttaattagaagctggatgattcttaaattaaagttgtcttattttcattgcaaagccatcttccagaagagtaaggcaagaacagtgcagaaaacttaaaagactggctttgctaaggtatcttgcaaatgttaaatcactcaatagctattcctaagacaattcaaaaatgtatcagagagtttgcttttatggagattagaagtaataacatgcttacttgccagccaaggaatgtttgtttcattcggtcagagagattacctattgtataatgatacatgtgaaagaccagctgtttgggatatatctattatctcataagcaagatgaatgcttgagcttagttttaaacactgtaatgcaggatgaaactagccatgatgatatcctctgcatctgccccctggaaaccatcagctttgaatttatatttttattctgttttgaggtcttgattaaaataaatctccattgaatgaaaaacaaatatttttatataagttcatgttgacttgtcaacagtattgtgggcaggattatagaagagagatttttgctcctcttcagctccctagggaagcttctccatactcattttatctagtgtggacaatttcttgagtttttaatggaaacgggttaatatttttgtcataggggacatattacatctgatattacggggaagaagggaagaaatggctcacttttcagaggtgcatttactctttgacccactagggtactatttagtgttctagaagaggtaatttagtaaattgtaccccagtggcctgaaaaagttaatgcaactctgaaaagtgagccattcaatcgattttccctattgcttttaaaaaatcaacactgaccatatccagagaatgttgaagacaactgaaattagaggatctagaagcaaccagtttattttcacacaaagcttgttgggacatgcactggatttggcttcagaggacccagatctacttcccactccagtacttacagataggaatcgtgaagcattcagtaacctcaccaagccttggtttccttgtctataaagtggtgataataataatatttacctcacaaatttttgtggaaatcaaatagctttactatatgtaaaatgttttataaactataaagcacaatagaatattaattattagaataaggaggttttctgaagtagccatttatgtatctgattttggaaagtaatttattgttagttttcccagaaactgtgagcaaagattagatggttatcacgttgtttcaagagagagtttcctagctagtcaatcctcagggtatttctattttcccccacatatattgcctaacaattccagttctttcattccttctcatcattaggctttatatctcttgcttctctgtttgcccactacattatttcagaatccttgatcaagagatcagaatgactgtagtttccttgatctcagaggtatttagaccatatattaaaagacattactctagttgatgtggagagtgttaaaagcttgaatcaggccacatcaacttgtggaagaaatatggaggtagtgatgaccacattaactctgaggcaggtatgggagtaaaaaggggtatatagccggagtaaacagaaagaagaaatggcaaatgtagagttacagtagctttctcttattgaaaatctttctaatctagccaagttccctatatcattcattaggttgatttatgagccctatgtacaatcagttatcttgaaattaatatctgtgacctcataacatatttgacttgagacctaaacagtatgaggggctctgtttttttttctttctttctttctgagacagagttttgctcttgttgcccaggctggagtgcaatggtgtgatcttggctcactgtaacctctgcctgcctggttcaagtgattctcctgcctcagcctcctgagtacctgggattacaggcacgtgccaccacgccctgctaatttttgtatttttagtagaaacagggtttcaccatgttggccaggctaatctcgaactcctgacctcaggtaatctgcccgcatcggcctcccaaagtgctggaattataggtgtgagccactgtgcccggcctgtttcttaaccacaaattattttgtaatcagtagtcaagcatctgtaataggtttttaggcagaaagaaggttggcaaagactgctatttgaactagtatagtttacataaaagcttctttttacaactgctgtttactttggatttcctgttttaacagctagagcctggctaatgtgtttatctattatggaaggcaacaactgtcagtgttgatttccctgaaactatttgaagtatttctgtggatggctactttagtatgtgacagaatactaaaatttcgaagcttggccattagtcctaaacgtgttaataaaatctaccttcaaataaacctaaaaagaccaagcaattagaggattaaattttaatttaaaaatttaaatttatttaatttaaaatttaaaaattatatttttcattagctgaaccacagctggtttacatttagttactgaaaccatatcattgcattaaaaggtgacatctagagggttttaaaattaatctcgcaaggtactaaaagatttttgtttgtgtcagtatttgtgtactcatgagctttatacagcagagaagcgttctgcatgttttgtattggcttcagagttgttcagccttataatcttttgggaaaatgtaatacaatcaactctcagattccttgttttaagtaggagacttatagtctcatgtgggtatctcctaatagtttaaccccctcgatttctaccatcttctttctttttgttttagttttcctttgtgccaatgctataaagtctttgaaatggaaacttctaagttgaggaaagacttgtatcttgttattctaaatttacataaaagcaggggcttttttggttaataaataaaatgtcacacaaagagcaaagaagcatcatctgtaagaatagaagcatcatctgtaagtatagaaactgatgatcctacagtatattagctttaaccaatgccatgttttaataaggaagtagatttaataattgaacctgagtgagaccaactcttaactttctgtgccaatgaggagaattaagaattgcgttttagacaatgatttatttgtcttgtctcgatcaaactttttcataatgaatcagatctcagagagctttcttttcctttgtctttttacctctgccatgtctctgatggacgtcctataaatccctagggcattcagagaatagagaatcagggaatacaggatatctcacaagctgtgaaatctttgcatggaaaacaaagaactgatgttattatttgagagagtgaactatctctgcaatgagctaataacaaatacatttgtaacttttatttattttaaaatagcctttgttcaccgtttttcttgtcttctacctgttctctgagagacatagggagcaaaataaccatcactttctttcttgcttacctagaataagaccatctctttttaattactggttatttcttgagccaaatcctaaccattgctttcactattttagtgactggattattttcttaggtttcctatccatttggagaacctttcaacaattgataacactctataaataattcacagagtaattgtgtccctcttttcactaaccttctttgaagtacgttatgtgagaagtagaatttaagtcagtagcatttagttcatgtggttaatgaaggaagtgccctgtgtccttcatagaacagtggcaatactatcatttcagtgtccctgtgttgccattatgaataaaagtcattatacatgcaattacgctccaggtcttttctccaagaggcaaaaaaggggtatttccgtgctcattttgataactattttgctaataaattgacatttatgacataggatattgtcagttatgctgaaatctgaaatatttatagtaagattataggccagcctcccccattctttctttaattatatcctacctcacaatcactaggaaagcacatatgctccctattataaattctttctgctcataatttaaaataatttgattggaatatgtttagaacttaatatgcagaatagtaccatagaaaatagatgcctactttaattgtatgagattgtaccagctttatcagaaaatgtatgatcagctctaggttatttattttgtgaacaagagtcagctgggatgattcatattttttggttctcctagaatttgaaattctaagcataaataattttagtaaacatggtaaaatccagatgcagttgatcttatgcatggcataaatttgtgtgggagtccagatgttggaatgtgaacacaggttgtttctcccttctgtcttgtgtggactttttaacatgttattttcacatatttattttccttacttttatttattttttgatacagggcctcactctgtcacctaggctggagtgcagtgatacgatcatggcttactgtagcatcaacctcccaggctcaagtgatcctctcacctcacgtcccaagtagctgggaccacaggcatgtgccaccatgcccagctaatttttttaaattttttgttgagatgaggtatcatctatgttgcccaggctggtcttgaactcttggactcaagcaatcctcccacctcagcctcccaaagtgttgggattacaggtgtgagccactgtgccctgcctattttccttacctttaaagattattctagaaattcagtttattctttgtaacgatgtatcttttaataaattcgcattaacagtttagatgaaggtgagcacacctctaaccttttatgtattgtactagactcatctttaacatttcaaggagtaaataatataatcagttggatttatccctaagtattgcttttgaaatcagtcacatgttttctgaacactttgtgcaaagtacttcgcttggcagtgggggagatataacatcaactttcatggcctcagggaccccattctttggggtctgttgttagcttactgtttgtaccttctcgtctcctttactgttttcttcgcatctttctgacctctgaatttagagagcctcagttccagtccttacacctcttctctgtttaattcacttcctaagtgagcgtgtgtagttccatggctttacatatcatctgtatgctgaggaagtccagatgtatgtctgtagccctggcctgtgtcctgaacttcagactcatatctgattaccagttggatgtcctctaggcatttcaaaattatctaaaactgagctctttatttctttggaaacctgcttcatttacagcttctcccatctccgtaattggaaactctattctataggatgctaaggacaaaaactttgcagtctttcttcctccttctttttctctcagattatgtatacctttacccacaaatcttgtgggttcttcctcaaaaatatttcaagaagctgaccacctttcatcactgttttcttgctaccctattcaaaaccactattactgcttgctaggattttactgcaaaagcctcccaactagcctcccagtttctatccttgctttcctgtaatgtgttctcttcactcagcagccaaagtgatctttctgaaatattaggtctccccctctgctcatgacctcttatatcacttggaataaaagtcagagtcctcaccatggcctaaatggtgctacacagtctgttttccttacctctctgacctcatctcccccagctagccctcttgcttattctacttctgcatacatgtcaagcacacatttccaccttgggcttttgaacttgctgtttcctctacctggaatccccttcccctagatgtccgaatggtgtgcccccatactgctcacatgtaacctgaaaagagaggcatttcctgacttcctccccaaccctaatatcaaatagcatgtccctaatgttgatcagtctctatatccttacctttatttttttcaatgcacttacccccacctcacatattgtatatttatttgattattgtcagtcagcccctattagaaggtaaacttcacaagggcagggacttggtctcatttgttctctgctgtatccacactgcctagcttattgcctggcaatcagagacatgcattaagtattaaatataaaaagaggatctaggaggagaatatatcatatactgtggaagaggtcaagcatatagtaatgaacaaaatggaccctgaccttccccttgaaacttacaataaagtagaacataacatagaccctatattaagaatttacagcatagttaggtaattagagtctacaatatagttaaataaagtgaacaccatttctgtaatcccagcactttgggaggccaaggcaggaggatcacttgaggccaggagttcaagaccagcctgggcaacatagtgagaaccttgttctaaaaaaataaaaataaaaattagccagccatggcggtactctcctgtagtctcaactactcaggaggctgaggcaggaggatcatttgaggccaggagttcaagaccagcctgggcaacatagtgagacctccgttctgcaaaaaataaaagtaaaatttagctaggcatggtggttcactcctgtagactcaactactcaggaagctgaagcaggaggatcacttgagcccaagagttcaagtctgcattgagctatgattgtcacactgtactccagcctgagtgatagagtaagaccctgttgcttaaaaaaaatatactagtaggccatgtgcagcggctcacgcctgtaatcccgcactttgggaggttgaggcgggtagatcacctgaggtcaggagttcgagaccagcttgaccaacatggtcaaatgccatctctactaaaaatacaaaaattagccaggtgtgatggtgggcacctgtagacccagctattcgggaggctgaggcaggagaatcgcttgaacctgggaggcagaggtttcattgagccgagactgcaccactgcactctagcctgggtgacagagcgagactctgtctcagaacagaaacaaaaacaaaaaaccactactgataaagtatatacctgtgaatttaaataactgttgaagagaaatagtaatttataacacgaacatataaggcaatagagtagttgatgccaatagataaatgaaaccacagggtaggaaatctagtaggtagggaagtaagtagaaataaaagaatggaatccaattgaattcaggaaggaataacatgaaagaagaaatggtgaccatttaagtaaatctgactgtataagacaacgatagtaataattcaaaatgaagttaaaaagactggagaaaataatatgttaagatgagaagggcttgattgaagttaaaacattctaagatttttatattgtttaggagaaggatatagataacaattaactttatgttttgttaagtcaggtatgattgttaaaaattatacgggtaactaaaacagtgaatagaatgtgtaacttcaaaacaaatagatggaataaagggagaataattcagtataatagaggaagagaagtcgataggtgtaaagtaaatgaattaggtggtagaaataaatccaaatatatcaataattacaaaaaatataagtagagtaatattagcagctaataggttaggttgcattttttaaaatacagttatgtgctattttagactgtattgggagaaatttctaaaataccaagacacagcaaaattgaaaggaaaagggtaggggaagatacctggcaaaaactaatcaaaagaatgctgctactgtggttatattaacataagacaaaatagactttaaggcaaaaagtattactagagaaatgttatgaaaatacaaatatttacaactgaaccacaaataccatgtattaatatgaaaactcctgagatgcaccaaagtaattcttaaaggataggtttatatacacaccttagtaaagaataactgggtatgatatgcttagaatctaactcaagaaaatcaagaaggtgggacagggaataaacccaaagaaagtggaaggaaagaaatactaatgaacaaaagtttgaaaaaaaaaaaaaaaagaacaaaagttaattaagtgaaaattcaagaaacaattcaacaaaaccaaaagctggttctttggaaaaacttaataaaatatagcagtgagaagcagaaataacaaaattaggaataaaaagggaacataattctatacataacagtgattttaaaaataataggatccagtgaataactttatgacaataaatttgaaaacacaaaatggccagtttcttagaaaaacttaatgaaattgtcttaaaaataaaaaccaaaatagacctagagcaatcaaatgattatttgtaaaatgtgcctgatgtagttttaggcactggaaataatagcagtgaacaaaaaaaacgaaagtgtgtgttttcatggagcttcctttgttgtggagggagacataataaattaataaattttatcaggtgttgctaactctgtgaagaataaagaaagtggccgggtgcggtggcttacgcctgtaatcccagcattttgggaggccaaggtgggtggatcacctgagatcaggagttcgagatcagcctggacaacatggtgaaacaccgcctctactaaaaatacaaaaattagccgggcatggtggcacacacctgtaatccctgctacccagaggtggcagtgagccgagatcacgccactgcactccagcctgggcaacagagtgaggctccatctcaaaaaaaaaaaaaaaaaaaagaagatgaagggagaatgtgctgaagggagaatgtgctgttttatgtaggaaagtcaaagaaacaatataggacctgaaggaagcaatggagcaaaccaggtatatattggagaaagtggcccagccctcaggagtaggtgcaaaggccccgaggcaggagcacgtttgatggaacagagttgagtattgtgcataagggagactggaagaagcagagatcagtgaggtaactaaccagggcccagatgatgaaatccttataaagacttttgattcagcagttagaaatctacccatgaaatggagatgagtataataacttctactcataagattatgaagttaatgaattaaatgcatgtggatttttttttttgtaaaacactatccaggtgattatttttttcatccagaagtagtaatttgtcaaacatttatgaagtgaggagcacctaccatgggccaggacatgtgctaagcataaagaatagaaagatgattaaaacatggcagcgctcactgcccagtactggggacagacacataaatacttttctgtagtgtgccaagggcaataatagagcatgtaacatttgaagagtaggagaagcatcaaagtttaactttatagcgtttataagaaagtgtatgggctgggcgtggtggcttacgcctgtaatcccagcactttgggaggtcgaggcaggtggatcatgaggtcaggagattgagaccatcctggctaacacagtgaaagcccatctctactaaaaatacaaaaacaaaattagccgggcatggtggtgggcgcctgtagtcccagctactcgggaggctgaggcgggagtatggcgtgaacccgggatttggagcttgcagtgagccaagatcatgccactgcactccagcctgggcgacagagcgagactccgtctcaaaaaaaaagaaagcatattaaagggaggtatataggtatttttagggtagcttatgcctcatattttcctgttaacccaaggagaatgaaaacttggccttctcatgattgtttagtgacgtttctgctgagattaacacctgaatggcgtacttaccacacctatctgtagtgtgaataaacttatagtagtgggcaagagataaacatggtaagaaatctagaagttggaacatggtatatccataccagatggctcttttaattgtctccaaagttggttcaacatgaagtaatactacgtgtttaagtttttcttaacaataaatgatatattgcaaacttttgccagttctttgttgttaaagctttattagagggtcatttgtagagcatatagtctaactagcacgtagagacactactgctctttaagtctgttttggcagctttcattctgaaatcactcagccagtttgaaaacttactatcttcctttttttttttttttagacggagttttgctcttgttgtccaggaggctagagtgcaatggtgtgatctcggctcatcgtaacctccacctcctgggttcaaatgattctcctgtctcagcctcctgagtagctgggattacaggcacccaccaccacgctgggctaattttgtatttttaatagagacggggtttctccatgttggtcaggctggtctcgaactcccaacctcaggtgatacgcccacctgggcctcccaaagtgctgggattacaggtgtgagccaccgcccccggctacttcctaccttcctaacatttaattcattagtcttatctcattggatcctcacaactctataagggagagactgctttccctattccagactagagataactgagacttggtggggcttactgacagtcaggttcacatgtttaagacgtgggagagctaggccaggcgcagtggctcacacctgtaatcccagcactttgggaggccaaggagggctgatcacaaggtcaggagatcgagannnnnnnnnnnnnnnnnnnnttgcctggagcaatttggatataatggtctttggcctgattgaaataggtcagtacctttgtaagttttgaattatatgtttccctgccctagaatacaggtaaaaaaattaaacatcaccgatctctttgtgtgtgtgtgtgtgtgtgtgtgtgtgtgtgtgtgtgagtgtgtttgacggagtttcgctcttgtttcccaggctggagtgcagtggtgcaatctcagctcattgcaccgtctgcctcctgggttcaagcaattctcctgcctcagcctcccgagtagctgggattacaggcatccgccaccaggcctggttaatttttgtatttttagtagagatggggtttcactatgttggccaggctggtcttgaactcctgacctcagggtgatccacctggcttggcctcccaaagtgctgggattacaggcacgagccactgtgcccagccaaacatcaccatctatttcctttaggtcctaaaatatgcatattctgtcgcggctcatcttggctttgccactgactgtgtgagcttggataagttatttaacctggcttttgggtgcttctgctgtgaaagaaggggattaggttaaataattttctctgttttctactagctcaataaattatctgattctgtaccaagattacaagttaagaccaacttctttgtctggtcatctataacctattgttacaaatgaaataagaaagtatggatagaaagtattcgcttgcactgggctctttgttattttaaatatttgaaaaacttacaccaggcgactaacttttgccatggtaaagtgtatgtgtgtgtgctcaattttaagggctgagactgttcccagaaggcctgtgctggtcacaaacaaaatggaacactcaaggaccaagcactaaaaatatctcataaaaatgcttcctccatgcagtcattgaatcaggtaattactgtggcaacaacaaactaatttgaagtgttagctgttaattaaaacattgcagaggtgtatagttgtcttttggtgtaagcagagcctccattcaaacttcattaatcactttacaattaatgtgttgaggaaggtcaagacaattgagatgtagtatctgttgaaagtaaacaaattccttttctctaagtaaataccatttggaaagttaagggacacactcgactcatgcctggcattgcctttgtcatccagttctccttgatgattaaatgttaaattggtactgtcattgcactgtaaaccaaaccacatagcatctttattcctcgaaatcgaacccaaacttccacggatgaattagcgtgcatcataattaaattatcaagcctctccttttaattcacttggaaataggacacctttcttttagaaaagagatcagctttcttgacaagctaattaagttgccaaactgtccagtatggtatgtatattagactatctgctaatcattttcttatcgctgctgctggtctcaaacgtccaggtgttgcttattcgaagtaacaacactgatctttttacaacttttgaatcctgtgtatatatttaattatttgtctttatatttcagttcttgattagtgattcgaatatataatatttttaaaagttggaattggaagaatctgtgatgtggagggggaaaaataatatatcacaaagtcttacgtattatgttacttggatttacgtggaataaacttactaatttcctttaaatcacatttcaggccaagtgcggtggctcacacctgtagtagtctcagcagtttgggaggccgaggctggtagatcacttgaggtcagaagtttgagaccagcctggccaacatggtgaaaccttgtctctatgaaaaatacaaaaaaaaattagccaggtgtggtggtgggctcctgtaatcccagctccttgggaggctgaggcaggagaattgcttgaacctgggtttcggaggatgcagtgagccgagattgtgccactgcactctagtctgggcgacagagcaaggctccatcttaaacaagcaaacaaacaaaaaacataatgtaggggatagggttccacttataaaatgtgtatcactttgtacaaagtataaaaaattattttgctggcacagtggctcatacctgtaatcccagtgctttgggaggtcaaggtgggaggatcgcttgaggcttggagtttgagaccaacttgggcaacatggcaagacttcatctcttaaaaacttaaaaaaaattagccaggcatggtggtatactcctgtagtaccagcggtttgggaggctgaggtgggaggatcgcttgagcccgggagttcaaggtcacaatgaactaataagatcacagcagtgcactccagcctgggagacagaatgagacctgtctctgaagaaaataataattgattaagttttattattattttctatatctttcagacagagtctcgctctgtcacccgggctgtagtggagtggtgagatcatagctcactgcagcctgacctggactcaagcgaccctcttgcctcagcctccctgtagtccctacagggggactatagaggactacaggcacgcaccacgatgccaggtaattattttattttttttaaaagacagtgtctccctatgttgcccaggctggtcttgatctcctgggttcaagtgatcctcctgcgttggcttcccaaagtgctgagattacaggaatgagccactgtgcccaacctgattaaagttttataagtagtatttagaaataaccaatgaggttgttatttgagaatatctttagacactttcaaaggttaaataattctttggtaaagtaaacagttgtcacccggtttttgtaatcttgctttttctttaaatgaaatatacttgaatttctgtataattaattgatataataaaagttaagtttaccttccatgactggcttgacctttgtccactcaagttggaaaagcaaaatgagtaagttcttataacactcatatatttggataagtatatacatatgctttatatatgtagtttcctagtcttgcctgaatttgtaacattttacttgtaaacgatattacaaatacctatatgctcttaataactaaatcatttctataagtcagtcaccttcaaaaaactcttgtcagtgattgttcaactctgtaaatttactaaaaagtagaatgtacccttaaaacaagtgaatgttatcatatgtaaattatatctcaataaagctgttaaaaaattttgtcagtcctttctgctcgtggacgccacagaggaaacatcattaaagtctctgttctccctgctgtcatgtctaagtcagagtctcctaaagagcctgaacagctgaggaagctcttcattggagggctgaactttgaaacaaccgatgagagcctgaggagccattttaagcaatggggaacactcacagactgtggtaatgagagatccaagcaccaagtgctcctggggctttgggtttgtcacatatgcccctgtggaggcagtggatgcagccatgaatgcaaggccacgcaaggtggacggaagagctgtgggaacaaagagagctgtctcaagaggggattctcaaagacccggtgcccacttaactgtgaaaaagatatttgttggtggcattaaagaagacactgaaggctgggtgcagtggcccatgcctgtaatcccaacactttgggaggctgaggtgggcagatcacgaggtcagggatttgagaccagcctggccaacatggtgaaaccccgtctctactaaaaatacaaaaattagctggtcgtggtggcaggcacctgtaatcccagctactcgggaggctgaggcaggagcattgcttgaacccaggaggcagtggctgtggtgagccaagatcgtgccactgctctccagcctgggcgacagagcgagactccatctaaaaaaaaataaaaataaaaaataaaaaaaagacactgaggaatatcacctaagagattattttgaataatatggaaaaattgaagtgattgaaatcatgactgaccaaggcagtggcaagaaaaggggctttgcctttataacctttgacgaccatgactctgtggataagactgtcattcagaaataaccatactgtgaatggccacaacggtgaagttaggaaagccctgttaaagcaagagatggctaatgcttcagccagccaaagaggtcgaagtggctctggaaactttggtggtggttgtggaggtgtttttagtgggaatgacaattttggtcatggacgaaacttcagtggtcatggtggctttgatggcagccgtggtgatggtggatatggcggcagtggggatggatggctataatggatttagtaataatggaagcaattttggaggtggtggaagctacaatgattttggcaatttcaacaatcagtcttcaaatttcagacccgtgaagggaggaaactttggaggcagaagctctggcccctatggtggtggaggccaatactttgccaaaccatgaaaccaaggtggccatggcggttccagtagcagcagtagctacggcagtggcagaagattttaattattgccaggaaacaaagcgtagcaaaagaggagagctagagaagtgacggggaagctacaggttacaacagatttgtgaactcagccaagcacggtggtggcagggcctagctgctacaaagaagacatgttttagacaaatactcatgtgaatgggcaaaaacttgaggactgtatttgtctaattgtataacaggttattttagttcctgttccatggaaagtttaaagcattccaacaaagtgatctaatgtagattttttttttttgcaccatgctgttgattgctaaatgcaatagtctgatcatgatgctgaataaatgtcttttttaaaaaaatatttgtcagagcaaccaaattttctgctaaacagcagaaaatgatgtttccatgttggcagtagtggattatgtaaattttggttttatttttgttttaagaaaggggaagtttaggggctcattaaatatgttttacaactgggcaggtgaagatgaggaattcctgaggcactgacttctgttccccattttccctatgccattcctatcctaacaccagatgagaggaagagccgtctgatcttagctagtgtataaaatcctctatagggcaagatttttagttcttcgaaacttacttacttccttatattaatatttttatgggcttgcaataacaatgcttgtttatgttatgtggtttattttgaaatttttattgtataaaaatgtgttgcagattgcttctaaataatgttcagaatatctagtccccacagtatatgtgtaaaggccacatttcatttaa

SEQ ID NO: 251 - DNA, 2083 bp, Homo sapiens
agcgttcgctcaactccagaaccttccgacctccgctagttcctgcgggcctttgcccgcttcccggtgcaccctccccgggagacacctcagacccccgacagcctgggcaggctcggtgcctgcgggtgcgttcctgatcacccctcccctcttccctccccctcatcctccattcccttgttttcaccctctgtcctctgcccgtcactccccttgtcacctcttggagccccctcctaaccagcggccagtgggtttcccataccccaggatgtgagcctctttaacctgtaatgctgtggctagcccttggcccctttcctgccatggagaaccaggtgctggtaattcgcatcaagatcccaaatagtggcgcggtggactggacagtgcactccgggccgcagttactcttcagggatgtgctggatgtgataggccaggttctgcctgaagcaacaactacagcatttgaatatgaagatgaagatggtgatcgaattacagtgagaagtgatgaggaaatgaaggcaatgctgtcatattattattccacagtaatggaacagcaagtaaatggacagttaatagagcctctgcagatatttccaagagcctgcaagcctcctggggaacggaacatacatggcctgaaggtgaatactcgggccggaccctctcaacacagcagcccagcagtctcagattcacttccaagcaatagcttaaagaagtcttctgctgaactgaaaaaaatactagccaatggccagatgaatgaacaagacatacgatatcgggacactcttggtcatggcaacggaggcacagtctacaaagcatatcatgtcccgagtgggaaaatattagctgtaaaggtcatactactagatattacactggaacttcagaagcaaattatgtctgaattggaaattctttataagtgcgattcatcatatatcattggattttatggagcattttttgtagaaaacaggatttcaatatgtacagaattcatggatgggggatctttggatgtatataggaaaatgccagaacatgtccttggaagaattgcagtagcagttgttaaaggccttacttatttgtggagtttaaagattttacatagagacgtgaagccctccaatatgctagtaaacacaagaggacaggttaagctgtgtgattttggagttagcactcagctggtgaattctatagccaagacgtatgttggaacaaatgcttatatggcgcctgaaaggatttcaggggagcagtatggaattcattctgatgtctggagcttaggaatctcttttatggagattcagaaaaaccagggatctttaatgcctctccagcttctgcagtgcattgttgatgaggattcgcccgtccttccagttggagagttctcggagccatttgtacatttcatcactcagtgtatgcgaaaacagccaaaagaaaggccagcacctgaagaattgatgggccacccgttcatcgtgcagttcaatgatggaaatgccgccgtggtgtccatgtgggtgtgccgggcgctggaggagaggcggagccagcaggggcccccgtgaggctgccgcagggcactgaaagcccaggaccagtaaccaaggagaacaacccacccgtcgcccttctccgtatgctgcctgcgccagaagagctttgctgggccctggcttccctgccctcgccttcacctctgtcagcaggtggccttgcctggggagccccatgtgtggcccaccccaccaggccatccccataccttctggtttgaaggcgctgacactggcagagaggtaaagggtggggcattgagaatggaggctcccagggtccctgcccacttctgttttcctaatgtttttctctataaagggtcaggcccgtcagcatcactgatgggaataaaagtattaatgctttgtgacagcctctgcctgaaaactggacagaaggacccagaggtgttctttcattttctctcttacctccaatctttcccctttcaagctacaggtaaaggctctaccaccat

SEQ ID NO: 252 - DNA, 1317 bp, Homo sapiens
atgctgtggctagcccttggcccctttcctgccatggagaaccaggtgctggtaattcgcatcaagatcccaaatagtggcgcggtggactggacagtgcactccgggccgcagttactcttcagggatgtgctggatgtgataggccaggttctgcctgaagcaacaactacagcatttgaatatgaagatgaagatggtgatcgaattacagtgagaagtgatgaggaaatgaaggcaatgctgtcatattattattccacagtaatggaacagcaagtaaatggacagttaatagagcctctgcagatatttccaagagcctgcaagcctcctggggaacggaacatacatggcctgaaggtgaatactcgggccggaccctctcaacacagcagcccagcagtctcagattcacttccaagcaatagcttaaagaagtcttctgctgaactgaaaaaaatactagccaatggccagatgaatgaacaagacatacgatatcgggacactcttggtcatggcaacggaggcacagtctacaaagcatatcatgtcccgagtgggaaaatattagctgtaaaggtcatactactagatattacactggaacttcagaagcaaattatgtctgaattggaaattctttataagtgcgattcatcatatatcattggattttatggagcattttttgtagaaaacaggatttcaatatgtacagaattcatggatgggggatctttggatgtatataggaaaatgccagaacatgtccttggaagaattgcagtagcagttgttaaaggccttacttatttgtggagtttaaagattttacatagagacgtgaagccctccaatatgctagtaaacacaagaggacaggttaagctgtgtgattttggagttagcactcagctggtgaattctatagccaagacgtatgttggaacaaatgcttatatggcgcctgaaaggatttcaggggagcagtatggaattcattctgatgtctggagcttaggaatctcttttatggagattcagaaaaaccagggatctttaatgcctctccagcttctgcagtgcattgttgatgaggattcgcccgtccttccagttggagagttctcggagccatttgtacatttcatcactcagtgtatgcgaaaacagccaaaagaaaggccagcacctgaagaattgatgggccacccgttcatcgtgcagttcaatgatggaaatgccgccgtggtgtccatgtgggtgtgccgggcgctggaggagaggcggagccagcaggggcccccgtga

SEQ ID NO: 253 - DNA, 27587 bp, Mus musculus
acatacacacacatatatatacatacatacatatatacatagatgcatatatgtagagaattgcaagccagttatctctgaaatcttttatatctgttgtttagaatcttaggtgcctatgtgcttctaaatggctgcagggttggggaagccatactgcctttgttgactcttattttccaccgtaaagttcaggtctaaaacagtcattatttccagaattccaggctctgacacctacccagaagagtctgtgcatgtcacaggagccctgagcagcttgttcaaatgtttcatatttacagagagcagcacagataagataaatgttttgctatcttcttacatgttttgaataggaattcagatgatgaagactcaggagccctaagatctggtcattggattaaaaagcacatatagagaacaatatatcagggtagccagattgaaggagtcactgtaacttaatttatttgtgtaatcttatttgtgagtttatacaatgaagtgattaaaaatattatgctcatgtaaataattcttttataactgttttccatatttgaaaattgaattacggtcataatattcgtgttgaaagttaataaagataactgctctttcggtactagaataatgcagtttgactcttttgaatggctcagtggtatttactatgataccacttctgtttaatcaatttgctctgccatggtgtcctatttctagaaaaccggaggacagttgtcgtcctatacatggtagacgggactgatctcaggcttatgaggttgtgtgtttaagagtttcagctccacagtggaatctctgggaggtggggctggattacacaggagtaggcaatggctttctagacgtcttaaaattaccattcaccctcaacacaggtgacctaaggatatttcagtctccagcggcttcctaaaactctgccctatccttttgtctcctcctgattgtctctgtgggaggccttatccaccccttaagtctaacatttctgaaacaatccatcagttccttttctccaaacagatatcatttattaacttacattatcaacggtgcctcaattcttgcgcttagcggcactggaacttgggtgggtttccactcatgcgcactgactgtcagtcagtccagcgctggtgctttgctccacccatgcgcactgactgtcagtcagtccagcgctggtgctttgctcatccttttgcagctcaggccttgccagctcacatctgttatggcaacagcctcactgctctgaattgtccttaaccttccatcatactatcgtgcaacctctccccgcagggagtcgggagaggtgggactccattcttaccttagatgtgaagagtcctggaaaaatccacgcgccttttcttggtatcaaagccccctgcaccccgcatgattggtgtaaacataatacctatttcgtccttaaataaataaaattccttgttactttctgataaacccttgcagtaaggtcatttccttaatcttgtcctatctcaatttgctgtagacttcatggtccagctcaggactgctctgtatataagcctccagactcattgcttctgtgagcttttccttggaactgtcaatgactctatagaattcatgcactgtccatgggtttggagtataactgtgaacctaccagggctttcttttatatctttccatttccaaagaaccaaataatcagagctcattatttaaacttgctgaattaatgactttgtcatggaagaatttagaatatcagagaacaattttctgactaatcaaattttgttttcagagtgtatacattaattattctgacaaattttctctcctagaaatgaatgttttatgtctcagtactcatatggtttttttgtttgtttgtttggttggttggttggtttttgcaccggaactttctgacagttgcatataggacagtaatattttaaagagacaaagacaagtgtcttctacattattgtacatgtgtatcatattgttcagtgtcatttttgggaggagagattttatttctgccatgatttcatataaaaatgagaatttcacaaaagcagttaatggaaaatgagagaaaatgaccataggtttttttttcttgaaaatttaccttgcatttaaatttttaatatgattttcacctgtgtcatctgtctgtgggcatccaaagcactgtaggtcatagaacagagttaagggtatagctttgataagtaatggtccaaagtgattcatttagtaaatttattcatcatatttctatttctgttttcattggcacctataatcaatttgtaattgcctgagttgaatgatatttgttttgttttaaaatattatgtactattaataagatttagtgtacttgatacagttgatagcaatgacatacagtcttggacaaggttagccggttagcttttttttttttttaaatcaacaatagtcatgctttgtcacagtggtctctactactcttctgtttccttctgactctggcaactcctgtcttcagatctaacagtggtcacagctgtggtgctgcatgccacaggtgtcccctgctcctgttggcttctactctctcacaatttgaacagtgcatctttcataaacaagcctgcctatgggtgccagtgacttaacaggccacgtattttcagttggaatcccgaaagagacaacatacatgcttgtatatcatattgttgaaattcatttaaaaaaaagattttacttataccatgctttcttttaaaaatgagaagaattgcaagaaaacagttgatggaaaatgagaggaaataaccatagttactttgaaactatttacctgagctacaagatgttgagcccccagtatgacttacaggctcaagaacaagcactagattggctcatcagagagcctgtaccttacagagtctgaaaggaagctagtggtcagggggctagaaggtgaaggatatcctagtcccaaacaggaaatacgtttggaggaaaattatagtaacttaatcagatctgtggtcaggacccaggcattctttgccagggcaaccaatgacgtcttcataactggctacaaacacgagagtacaaagcagccaaacatagcctcgccccctatctaacatgttactaacacatcaaattctgttcacttggaattttcaaaagaaaacaccagaattaggaagctataacttcatttttcccccaaatgtatagaagtgttgtgatggaaataaatggaatccattagaatctctagaagaaaaatcaatttctaattaagtatgtataatatctttctaatatcatctttagcatgccagtctatgcttcagtcttgagtcacaccagccttggtgggccactttatttcactatgatgcttatgatataaaaaaagaaagacagaatattataaatttaaacatgatttaaaatgtaaatctttttagttaaggattcagccattaaaagttggactgaaaggtaactttatgagctgattgacatatttttgtacatggagctaaaatgaaatggaagagctacaatggataagcactaattgtaaagtagaaattctttatgaaaagcagtttgtataataatagtgtttgtaggtctcatctgagattcatctatgaatctgtaggtctctcaaattgtgcgcaaactctttgtgtgtagttatccctcgttatccatggagaacatgttccaagactctctgtagacacttgaaatcctagatagtaaaactctgtaaatgaatgtctttcccatctttgccaagcccaccacacactgtgtctgcaacttctgcagtcagaggtgtaacagcaaactagcctgactttccctccttagtgtgaatcctaaatacctcagcatttgatctttttttttccttattaattatagaaatttttgccagaatcaccgttcgttcactgcaggtcattattaagtaaaataaaggtagtttgaacaaaaccagtgagatatctcagtggttgatctgatagctcagggaacaatttcatggctaactggtgattgtgcatagtagaacaaccaactaaagggataattcacatctcaggtgactaacattgaacctcatcacaagagtgatgccaattcaaaatttatgaattgtttatatctgaaatttcccatttaatgatctgggtttacagatgaatataggtaatagagactgtggaatggaaaatcacagacaaggaagagctagttggaaccatacttcctctaaatatgagcacaaaactgatgttgtcttgtcgaatgaacaaagttgttctttttttcttctgttcatttatgattgaaagtatcagtcacgaataaattacacattagctctttagtattttgtgtgactttgtttgaaaaaaaaagtcatttatttttgttttcagtagcctcatctataaaacaagggaatggctttagataattttcaagttccttccagctgagatctctctctctctctctctctctctctctctctctctctctctctctctctctccatacagaactccactaaaatggtggagaaaatgaagtttactttggtccagtcctcttgccattcaacttaccgactgctaaatagtaattcccttgattctcacatgaagatctcagtatcagctctttgatcaagtccagactctagaggacctaaaaccaaccactggaattatgttagaatgttgatgcagtgtgtcagagggaaaggaacaatagaccaaaatctgttgggaggcttgagttcaagtctcaaaggctgctcatttgtcttgaacttggactcgtcttataggctcatgattctaaactactatgttccctacattgtattttatacttcatattctttgtaaatacacaatttagcttaactgggaggtgtgtgtttgtgtgtgtgtgtgtgtgtgtgtgtgtgtgtgtgtgtgtgtatacatccttttaaggtcaaagttctttgatgtttgatcaccttagagatgattttccagtgcacctgtacagaggttggtttggttcctaagcatagtaattgacccacttagaattgatgagaaggaaagaagttgtttttgtaactattgcattcccttggaaacacaatcaattgtcaaccttctagaagccagttctaccacaagtttcacagactattggtgggaactctggctctcacagccttgccctgggctgcagataagtgctttctcacctctgcccttagtcttcatgtcacctggtatagagcctatttgtgaggaaaagagtcttgaggttactgcttcctgtctccacagctttggcttgtttagctgctaggagaggctttgaaaagcaaagcacaaattcaccatcaaaacaacctgatgattggtagacatgccagccaaggcagtcttttactgtgttgagtgaatgcagttgggagagtaacgctgtttcttgtgggtgtagcctaggtaaaccactcacaagaaggaaaacagaatcaaatatttgcagagggaaagaaagatagttcctagcatggtttagaaaacaacacatcttcaaacagaagtccatagaggaaagctaaatgtatctctagttccttccaagtcggtgcttctcaacctcactaatgtggtgaccctttagtacatttcctcatgttgtggtgaccccagccatcaaattattttgttgctatatcataactgtaattttgctactcttatgaatcacaatgtaaatatctgtgatgcaggatatgtgatattttaccctcaaggtggtcataactcacaggttgagaaccactggtctaagtctaggtatgtccttaaattttataatattcccttaaattatttgaaataccacagatccccagaaactccaaaaaacaaaccaaaatacatagccaagctgaccattgtcatgtgcttcagttcatctgtatctttgtgctgtactgctgtagggtggagatggatctcttcacgcatgctccatttttaagggaaattaaaaggagctagtagtatcatacgtattagaaaccacagtgagtacacatggtcaataccatttaggacaactgtaatctttctttcatacctaaagaaacctattttatttcgtgtgtctccagagaagatgtcgattctgaggtcctgtcaggtagcttctcacggggaataaattaaggtgggactgaaatctagaaattgtattaacatttaaaaagaggtcttatcagctcaaatcctaagctaggaagctgttagccacatatcagcacaatacaagaaattaccttgactatagcatctctctttaagcatcagctaatctaaaaattatctgtcgacacagaagagagaaatgtgagcaccgacggataaactgcccatctccttttcacagttttcaaactcttcccagcaaaagctggcacagtcactgaatgaggcatttcccctttccttggtctgtgcttgatctccagcacaatggcagccaacacacagccttgacacaggggctgtgcagttctcattgagagcatgcttggtttgtaacgctgaggtcaaatgggcttgggagaaatcagacaacctcagtcatgctgaggcttgagctcagaggcctcgtgctgggaagaagaagaaaagctacctttgagttctcatattactccttgtgaagaaagaccgtttcagagaatgactgcagtctcttcctctgaaagtttccatcctgtgtcccgacccctgatgctgaaaacatgtcttcgttatacccagatgtccacacttgacttagtttttggatctgtctattctggtaatgaagtagaaatgagtaaaaagaaaaataccttcttgtttcttaccctgtttggctgaggaagtcattttaaatgcttccttttctctttaaccacacctaaatcactgtcaagttgggtaagcattagcctgtaaacattgctcacttcatccactacttctaagccagtgtagtctctcacctctcacctctgatgaatcttgcccactctccatgccctcatccttgtaccttccataatactgcttccactttggttagcgtgatctacagaaatgaaaagctgtgagcacctgcttttcggcttaagagccttcacttggtctctatcactggcaggagatcttggtaaacatttgtcaatcaatgtaggcatcatcctttatcccacagactagcagtcttcatgtctaggaaatcaactggtcccacaacctgcagactgttgtctactggatcaaaactatatatatatatatttttttttttttttcttccttactagactgggaactgcccaaggaattcatgtgtaggaaatctgttttccttctcacatgtgtcttgggaagatgtcatctgctgaatcagacagggattactaaaagaacattggagtttggatgttggagcttgtcctatccctctagctcctccctacccctacacagatgttcacagtagcattgctcataacaggcaaaaaaatgttgagtgtaaaaacaaaatgtactacagctgcacaacagaatagtcataaactggagttctgatactttatcacatcacacacgaaacttgaaaatagctatgtgaaagacgccagatacaaaacgacacacatactgtgatttcaaacataggatatgtcctgaatgggcaagtagagacaagaagtagaggagtggttgccaggggctggagggagagcatgacgggaactgatggctcctgcgatggacgtttccttttcgtgtaatgaaaatgttttacagaaatggtggtccactcacaactcccattgtattaaaaaaaatcccttaatcgtgtttttaacaagaagaactttatgatacgtgaattacatttcagtaaagttatttcaacccaaatatcaacactaaccacatcttaacttatatcaaatatatcagaatttctgagagtaagaggttgtggatatgcgttttctttttaagttctatatgtattgaaatactgataattatatagatgataaaagttagtagagatttaattctgtgtactcaccttctacccaaagcaaaaaagaagaaatacaggaaggaagaaaggaaaaacaaactcaaacaaacaaacaaacaaacaaacagaaaccaaaaccaaaacacctgtgtacatggattcaatcccaggttaaatgataaatttcatttttaacaacttcggagtctaactggctcttgggtgtggtacaaataaccttttaaaaattagaactagcaggctgaagagattgctcgacaattagaggacagcctcacaacaagaactataaataggtagctcttagcatgcttccccagtaaaaattgattttaattttatttatttatttttaaaaatttcttcacagacagcaatttgtttactactgaaaaattcaggtcatgtctgagaaagaggatgcctacatcctatccgtctttgatctatgatgttgactctctgtgcctaagcggtcagctatttaggtggtgtagcctttggtttcagttctgattttgttcaccatttgctcaatgtctgtagatgaaccattcatgtttctagacctcattcagtcatctttttctttttaaacaaatgtacagggacggtgtcccacacttttaatcccaacactcaggaggcaaaggcaggtgaattagtgagttataggccagcctggtctatgtagtagacagccagtgaatacctgtttctgtttctgttttgttttgtttgtttagaaaaaaaaaagagagtcaaagacatggtaggcacctgttaccaagcctgacctgtgggtggagggaaagaaccaatcctacaacttgacctctgacctccatttgcatgcatgttctctctctctctctctctctctctctctctctctctctctctcacacacacacatttaaaatgtaatactttcttttaaaaaaggagtgtacttctgtatttctgtgttctggaaatgggggtgcattggaaacagtacgagctttgtctcccttctcccaaaggaactgagagtatagttttattttctttgcctttaaggggagaaattgaattagatggtatccagagctttgattgttgcataaagatagaactcttcttgctttgagagaataatcatgcaacgtttttgggaggctcttatctgaatttgctctggaagagtaatttaagccagcccttggggctacaaacgtggtgcctttctttacccctttattgactgctcttggtttggtcaataagcaaagtcagaatgttttaaaactttgaaatacttttacaaaaatctgttgcagagttgaaaaaaaaatcacttggacatctgtgtcaggctttcaagaggcctccaagctgatcagttattcaggaagtcaacccaaggcctgactaacatcataggaatctcaactggactaacaaaattctagtgactagctggggtgctcaatgctcacagcagctcacatttagctggggtactcagtgctcacagcagctcacattgtgctgtccaggtggaagcacgctcctgtcttcccattcagagaaagatgccagcatcattgaaatataaacttgagaactttcagtgtagtcatcattccaagaagagctattaatatatctttttctgccaagggactaactttgttggaggtctgttcagttggctaattaattcactttgatttcagggcaatggaattattattcttatgctcctaactaaatgtttttttcccttcagaaaacaagattttggtaaagcagtcgcccctgcttgtggtagatagcaacgaggtcagcctcagctgcaggtattcctacaaccttctcgcaaaggaattccgggcatccctgtacaagggcgtgaacagcgacgtggaagtctgtgtcgggaatgggaattttacctatcagccccagtttcgctcgaatgccgagttcaactgcgacggggatttcgacaacgaaacagtgacgttccgtctctggaatctgcacgtcaatcacacagatatttacttctgcaaaattgagttcatgtaccctccgccttacctagacaacgagaggagcaatggaactattattcacataaaaggtaacacgccactgtactcctgtaacctaaaggacggttgcagaatgctgaaggcagggttgggataagtgaagctggggctctcgcatgtgatctgagactcgaaggcaaatctcataaacctgtttctttttactccagcaatgattccagcttatttggaatgcctctatctttcctcactgaaggatgagggaagagtctatggaaatagaaactatgagattttcctgaattcatttgaccttttggatcaagtatgaaattgagcagagtcctctacaatgaaacatagtctgacagatcaggactcaggaagaatgggttggatactaaactaattttttttttgatccatgttcttccacttactaagtttctttccattttccaaaacataaaaaggatgctggtctagaaatttagggggcatgcaatttgagatcttggctaagttatccaactttttaatagccccaaacccaatataattaagcagcactcatgaatcagcagcaataagtacattatgtttacgttgagattatgttctgtgtaaatactgggaagaaaaataataggattctcaaactcaaatatagttattggcattaacattaaaaactgagggagggtggatagatttttatgtatatgagaatgacagataagaaaatatatactccattttacattcaactttagcacaattacaataaatgcattttcttttatgccataacaaaggtgtacttaagaaaatttaaatatcaaacaagaaaagaattattatgttaacatgacagtatctttcatgtcctggcaaaaacagaggcaattaatacacaaattaagatttctaatatcagtaattctcaggcaaaatatttaattggattgagtcagaggataaaaagatatactattttggaagagtaaaacacttttccatataaatgatacattactttaggctagtatattgtgtgtatgcatacatatcgatttaggagaactagaaaagaagtcagggattctgtacttggcagctttcagccctgtttatatttgtatatcataaaccctaagtaggtaactggaaaaatgcctgtgctcaactttaagtttctgacttaaccaacatggcttgaggaaggggaggtagataatgatttcatactctgccggataattctaatgtgtagccaggattaaaacctcatggatcagagagttgttgatattctttttatttttgtattttattacaactttattagaaagaacttggaaataaaaaaaaaaaaaaaactcatgtatccaaattcatcagactcaaagtctatacatctcaatgaactgtgaagtattctgcttagttataatcttccacgagttttaatagaactgcatggagttttttccccatcccctttctcataccaaataaataacctgactcattcagtatcggataatctgttggggttggagccagatatttatcttttcaaaattttccaggctagagttctgactgccatattaagctgatgatttttcttaggggttgaaaacatttgtatcattttacttatttcaaagagtttagggtataggtaaattatctatatacctgacgagggctgggggtcaggttaaagtcactgaaagtcgccattagcactatgcagtgctaacaagacccagtgactgacacccatgtagcactacaaagcagtgtttgtaaccttagccttgtatactgacaaagtatgatcagtggtggggttgagtaagtcccaaagagcaagactcgatcatctaagctggtggtattttgcatgttttagtactttcaaattcgcctctgatgtacaggacagaaatgtactcaactgctgtttctgtgtcctttaacccacatgttgtgtttttcagagaaacatctttgtcatactcagtcatctcctaagctgttttgggcactggtcgtggttgctggagtcctgttttgttatggcttgctagtgacagtggctctttgtgttatctgggtaagaggagcaacattgcttttatgtaacttctctgcgcctgccctctgactatattaagactctggcctgtatcttttctacgttaaagcaaatgacgcttttcagtctgtccaacttatacatagtaatgatctgatgtgagttctgtttcccagaaggcaccaagtagccaggcagaattagaatgaaatgggaagattacggtgggaaattagagaattagcttttcttattcttaattttctaacataataattgcatatcaagcagcttaaatgcatacataaggtataaaatctaaatctcatcaggattaggcaactgaagcccgtgctttggcttggggtcaaaaatcaggagaaagtaggctgctgaaattgtgcattcaaaccagaagaaagcaggtctgtttatgtcagtcctattttctgtctcttctgaagcagttgccctgtgtgaggtcaacttggatgctgtcattatgagactgtaagaggagagggactgttcagagctctccccactgaatagagattactagtctctatagatttttctgcaataagtttaatagatattttcttcctcaatgttgaatttttgattcaagattaaacattttgtgttcgtttgattttttttttttttttctgagacaatgactcaccatgtggaccagattcgtctggaagctactatgcaatccaaactgacctcgactcatgtcaatcctcctgcttcatcctcttgagggcttataggtgtatagcaccatgtctgacttttgaacatatttaaagatttttgaattttaatttgtgtgagtaagtgttttgcctgcatgcatgtctgtgcaccatttatatgtctggcactcattgaaagccagaagagggcatcagtttttctgaaactggagttacagatatttgtgagctaccatgtaggtgctgggaattgaaccccgttccctggaagagaggccagtgctgttaactgctaagctatcttccttatgcttgttgaacacattttgatgaacacattcactgttaagatggtacgaccttaacaaggatccttttcttagaaacccctttgtgtaggagtaacagaatgccttatgtattgattccaaatgcctctgatttttttttccccagaagttgggtgaatatacaggtaagttcttcaatgagaaatgtatgctgcacaagacaaaaaagaccccttatcttgctactcttcacccatctactacgaagcacacttaggacttagtgaatgcttattgtgctgctaaataggtaaccaccatacaaagcaaataaggacctaactaagcctgtttgagatatgatacccatttaaaggcataatccaaatatttaaagagacaacttatgatcagggatttctagaactcatgccatgtgatgccatcttatttactatagcattggagaggggacagggcagctctagctctaagtcatcaagttgtatcttcccaccagagatttaaattgtttatttgcttagccaaagttgcctctctattctattattccccacacattcctgtagttcacaggccatggggcaggtggacatttgtcaggctaccttttgacgagtctataacttttacacagtggggaacagtgctagcttgttcatgggaattgtttcatcttgagaattccaaaagttgtcaatctgggtatggtgacagaggctttagtatagaaactattgcccaacttctggctctgatattagttgagaacgtccatcgctctggactttggagtctgcactcttgctatcttcttgctctacaggggcctccaatgactttagaatccttaggtttgacttggtttttctaatcctcaactactgactttcttcctttccaagtctctaaccaagaacttgaatttcctaatctaaagaccaggtgcaatagccctctgggtacccttccaagaaggggctcccttgtcatgtattgacctaggtcaaaggaatttactagcttcgtgggaaggacttctggaaactgctttggctttcagtgatcccacaggcaccactttaacacttatggtaaatatatatcaaggaaatcagcttctaagatgaggcaccaatgcactgagtgactgaaatcaccccaaaagcagcttctcactttcaatgagttaaaacaattcacctttcaagtcatgcatcagatatgttttgtgctttcctttggcagccccccaatttctggtaagattcatcttctctgccttgggaaaactgttcttgacttatctcacaggctcactgtgactagacagccttagtgctctacttgtgtggattttgggagtcaaaccaggctatctaacaaaaatgccacttatttggacttcaaacccaggtctttgtactctctgaccaagtgggggtataagaataatttgcacctcacagaacaatgtagcgcctttaccatgagctcttcctttcctgctatttggtcaggaaacatcttggtgagctgggcatttagggatcccgaggacttaaccactttctgggatcctatttttgtctggccagcaatgtgccctaggtgaaagttaactgggttccagagccttctgagaatccatgctgtgcaactgtaggaagctccaggctgtgtgggtttctgtctctgtgcttgacctgatgttggcatttgagtaaagaaaaggcatttcttggtcaggttgccacagactgcgacctgtttttttttttttttttttttttttctaattctctgttcattcagctgagctgtcacactggctccctttctaggttagaggagcgttgttttggtttgtttgtttttgtttttgttttaacatgctttatgccagtatgtaccacaatgtgtaggtaatgcgtatttaggtagcattatctgcctttaaatctgcattcttgaccattttagtacattgcttatgtgtgccctgtgtgtggctgctttgtctaggaaacaaggcagaggtaggaggaaaggcaaaggatagagtggccttgaagtcatgcatctttaacgggcattggttggtgagggacacagatacacagacacaaggggtgggtgttctatgcatatacattgtgagagtgcacatgaacaccataggttttggactggatccccagccatttccatcccattggttaagaatcagctaaacccactgtctgataatagtgttggggtaagcatgggagctgattgtaacagattttctttatctttgtgtgtagcttggagaacctcaaagtcacaacacccttcttactgaggcctttctttaagctatggtttcactggaggatccacaggcaagggttggcaaaggagaccctaaaagctagcatcagtactgaaaactgcttgcctggatagtattcccagcagtctttgcttactttgaggccttggcatgtgggtgtgaaaaggaggccaaggctgtcctcaaccactcattatcaatccaggaacacctgtccctcatacctattgtatatacttatcacatctgacttgtctgcttagaataaggctttgtgtttaaataacagagaatcccgactctgcaatccacatgactttctgcttttgacaactatgcaaacattaccatcacattgatctagcaatgatgccctagaccacagtcataaaaaacatggtcaagatgcaaagtgagtttacctctagttccaggcttagtatcattcctctttctctgctcctggtagaatttggtggtttttttttgttgttgttgtttatttgtttgtcttgttgttgtttaattacagaaaaatagcttacttaatgaatgattaaagtgggagtgtttaatctatccaaagactaaaggctttctattgcatttacatatcaatagtgaatatgttctaaaatacattcttgggcttcggattagatgacaacattgagaataatggttgcatttttataaaacaatttcctttagatttttagtagagctgttgatagtcaggctttgattagtcattatcctagtccaaggcacacaaaaaggctcctcagggtcatttaacagctgatgatctgagtaattatccctaaagtcttagaacccctccaataatacctcctctaagtccttccatattgacctttttcttttttcatttccccccctagacaaatagtagaaggaacagactccttcaaagtgactacatgaacatgactccccggaggcctgggctcactcgaaagccttaccagccctacgcccctgccagagactttgcagcgtaccgcccctgacagggacccctatccagaagcccgccggctggtacccgtctacctgctcatcatcactgctctggataggaaaggacagcctcatcttcagccggccactttggacctctactgggccaccaatgccaactattttagagtgtctagatctaacatcatgatcatcttgagactctggaatgaatgacagaagcttctatggcaggataaagtctgtgtggcttgacccaaactcaagcttaatacatttattgacttgattggggaagttagagtagagcaatcaaaaagatcattcattcagccttgggaagtcaatttgcaggctcctggatgagccctgccccgttttcacttgccagcacatttcagtcatgtggtgtgatagccaaagatgttttggacagagaagaaaggatagaaaaaccttctctttggctaagttggtgtttggggtggggataggttagagtatagtacttaactatttgaaaaataatgaaaacacttttttcactcatgaaatgagccacttagctcctaaatagtgttttcctgttagtttagaaagttgtggacatatttttttaatgatttctgaccatttttaatcacattgactcatggaatggcctcaaagcaccccccagtgcttctttcctcattcccggtcatgggaactcagtattattaatagtcacaacatgatttcagaactagatagccctcccacaccaagaagaatgtgagaggaagtaaggtcactttatgtaaaaaaaaaaaaaaacaaacgcgtacacatatgtatgtatacatacatacctatgtgcacacacacacacatatacatacacacaaaatgctatgaagagttatctgtttagtagcctgttatagtcaaatcattttaagtttcaacttcttacagttgggccacttgttgtcctttgtggatggatatctgaaattgtgtctatatattgctagtcatgatactgtgaacaaaaagggtagtgttagtatttgtcagggtggtaaggatgcattccaggaagcttcctctgaggaagggaatgaggtcattcttgccatgtatgaaagacatagatgttttccagaaggcaccattgggagccccagtataagttcctttagactctacagtttagagggattttatatgtcctaggactcaggactccagaactttgtgggctcagctgcttcataccatggggatacattgacatgaacaattattttggaatgtgtctttagggacgacatcaaagttctcaagtacctacaagacctgatactggaatgaaggtggactttcttttttgcttccagttcggatcaactggaatgtatctggggaccttgaagaacggctgtccagctgtcttcaccatttgtatagtgctttgaattattcagaggttttaaagtcaggaagacctggtttaaaaaacatttcattatgagttaaatggcctcaggcaagtcactgttcatccaagtctatgactcctcaactgtaagatggccacactgaaacttgctaagatcctctggcctctgcctcccaagagttgggatttcaggagtgcacaatcatgacccaaactcgtgataatctctcagcttcaataactttccagctaattggaatatcctgtaatcaaacatgaggcatttcccctccccccactgtttttgtgtataaagagatctttaaactttttttttaatatgaggggtaagaaaagataggaatcttttaattctagacagaagatattgtgctttggttttttttttttttaatggcttctattctgtgcttttaattaaaccagagaaggccaagattagccctacttgtgtgataaaagaatgctggcccttgtgattgcagtcagcctcttgacacatagagttcttgaatctaagttataaaattatatttgaaaatgacagagctggagaatttatagaaagggtcatagcaaataacaaaccatttttttttaaacggaaagatttggtctttggcaatcaataactttgttttctaactggaaaaggaggtttactggagatgaatcacacctgaaagttttcatacctcctctgaacacaaccgaaacataggtgtccaaagcctttcgctctcggtatgaaccaacaggcgggttaaaaacactgggtcagagtaaagcttttgcagtttcagatgtagtgtgtatgaagaaaactatgtcacttgctgctattattgtaagagtctaagaactaaaggtgtgcctgtaatttctaattatgagctcacctatttggtaccgagcatgccaattttaaagagacccggtgtaccttatagctacatccaatgataaaattaccacactagcacatgcctgtgtttaaactcgtgctttaatgtttttcttagggcaggtatgcaccccctttgcagtgagttgggagagattttgaaaaagtgtatgacaaacatttttaacacctttggtttcctctctctgtgtctctttgtctctgtctctctctttctctcctgtgcatatgtctcccctccctcacttctctgtctcttcctctctccctctctctgtctttctctgtgtgtctctctgtctctgtgtatctctctgtctgtctctttctctgcagattttcaaaacgttgtttttctatggaagaaatacaagctgtggttggtttgctacgagtcagtagcagtttatcagtaggccaatgttttatctcttggagatttcagtctgggtttacccaatgtattctctgtaatgtgactgctggggacagatataacttgattgagccttcaaatcatttaggtcttcaatcatttagtcaacggagtgagccactaatctgcaatggctattttaatatgcatactgatggtcaaatggatgtctgatctctcatcccagctttctgtactaccatatgggaactatatgtaacttgtatacttacctgaatatgttaaattcaactacatggtaagatggaccagaaattgcaatgttcatgtccatatagccaccattaacccaagttaagcacagtagtgtgggttctctcaggacttgtgaatgagtttatgctctctacaaagacaggtgaagcttaaatctctcttgcactgctatgtttatgcaaatatcaagattgtttctgtaccagggacttaacacattctattcatactattttccctgtctacaatgttatttcatagatatctacttggtttgctcttacttccttgacatatttgcccaaatgccaccttcaactgtagttaattacctgtacaacctgtctccatgccttgttttattttctctataactctactaataggtatttttcttatttattggtttattgcctgttttttttcctaaatctacaccggatctccaaagggaaagaactccatttgctttgattttattgctgtatccccagtgcctagaataatgcttagcctgcaataaatatttattcattgactagatggatttcacgtgggtttatgagttagtggcaaatctgaatgatctgctcatagtctgagaaggaagcagaatcacttctgttttccacttcctattagagacagaagaggtaaagcagacacagagaaatctggtagaaggacatatcattgatacaaattcatttacagcttagaaattttcatgcatcctgaaagatgaatacagtcggagtcattctaaaaatgttattctaaaaacaaccaattaggaataggttgattttccatttaaagttctcaagttctctctcaatagcttcttgacatcctttttgtttttattttttattttttggaaccttcttttaaaatgttgttattggggctgaagagatatcccagtcatttagagcatgacatgggctatttttccagaggtcccaggtttgtttcccagcacccatatttgatgctctcttttgatttctatggccaccagatgcttatgtggtccaacagacattcatttaggcaaaacacacacataaaaaataaataaaaataacattgttgacaatttcatgcatttgttcgctgtatctgacaatacccatacccagctcctggccaccatggccctgggcagtccccaatgcacaaccccctcttgttttcacgtcctcccctttcttttccttttcttttcattttggtaacccacctagtccagttagtgccacttgctggaatgtgtaccagtcatggtggcttgaccttgaacaggtcttgtacaggtagccatggctcctgtaagttcatagtacaatggctgtgcagtggctgtggcatatctagaagacagcatgtcacagcatgccacactctctggctctgacattctataagttagttccctcttccatgacgtcccccgaactttgtgggaaaggttgcttgctacagattcccatttagggttgaagaaaacacaaaagtcactcattctcaccaatctgaccagtttctgcctagtgcagaaaagaggcttatttggcaaaggctgagagcagcacttacctatggatataaaaagaaatatttagaaggaagtcttacctgtctattcagtaaaacaatagcagtgggttccctattatgacctatgacttatgaaccatgagccacggacttttgaccaggttcacagtatcaggcatcaattccttcctatagtgtaggactcaaatctaatcagaaagtgactggttaacccataaccttcctgtcaccattgcatctgtgggcacatcttctctgtcaggttgatattgtagcctccagggaccggttcttggtggcattgtttataaccccaccccacccctcagttgccagaaaagcacctctcggcactatgaaagttaaccagcaggaaagaaattctcaggccatttctaccttgactactctgttctgttctgtaattaaagtctgttgtatcttcagcagcagggctttaccatgcagttaaggtgggcaaccaggacaatagcagcttctgctgccttgcgggcctccgcagtctctatgacatatcccatgcctggcactgagagttttttcatttaaaacccatgtttctgagggaagcattttgtcaatgctttaaacccatctttagcttctggtttctgaaaatatggcttttgtagttaaaaactcaccctacagctgaattactgctcttctctgtggagtgattttgttccagtgaagtctagaaatgctttgttagctctgatccaaaaagatctcaaacaatggtcaggacaggaaatgccagtctctttacctgtcttgctcatggcgtaagtgggtgcttgaaaagcttgcaacagcttcagccaaaaagaagagcaaacaagcaaaatacgtggcattgggagcaagctgaaaatttataccatactagtatttaacacacacatcagcggacagtggctgggggtggggtggggtggggggcagtgcaaaagaatcctgtgtgtggaggaggagacacttgagccacagacacaagagcttgtctgatacttggtaatccatgtagctgtttctatttggccttaagttttcctttgcagatgacctggagtaaacaaggtacatgatgaactcatttttaaacccactctttgttttgttgaaacgagacttgtggagttcaataaatgcagagaaagcttgaaaaagatgagctcacatccaggctactacttaagaaagtctggaatcagctagtctcgtggatgtttcaacagggaaatcagatcaaactggaaaggtaccagattaatagatggaaaaacctctgcacagatctcagtaaggatgtgtttattgtactaatggaaaattgtataacctgttaaaaagttgaggtacctccagactcatcctcaaggtataacacaaggcaaattctatgacatcactagacaggcccctctatcatgtcttaaccccacaaatgtgagaatttacaatcaacaaacaacagcctttagtgcactttgtaggagattcagtccagggctccatctaggcaaacaactgagctgcatccccagcccagggtagtttccttttcagtgggaagagccatgtgtgtatatatctttgtgtatgtgtgtgtgtgcatgtgtgtgtgtgcataagcacatgtgtatgcatgtacatgctgatgttggatattttctctatcattctgcactgtactttttgagacagactttctcactgaatgtaggactcatgccagtgagctgcagtaagctcctgcctccaccttcccagctctagtacgtcaggtgagccccttaaagcctgactctttacgtgactgcttggaatggatccaaacttagatctttatgcgacaggtcccttactgactgagccacctccctagacccacattcctatttaagcagtatcttttgtcatctctcgttatatctggaacagagatgatagatagttgagacaaatcaaagaaactcctgggttcattgcaacagaaatctgacccccacagtaaaaggcagctacagatggtctgggaaccaccttagaaacctgctgatggtgtgctctgtgttctcctcaactgagcctccattgatgtgctggcagtggtactcaggatcttgggttttgagaaatacatctgagagattggacctccttatgttttcccatctgacattctgaaagtagggtgtgtgtgtggtttttgtttttgtttttgttttttttttgaatcataggtttatggttcttaaaactgtagactactgtccagagcagtatgtgaaacactagcttaagtgccttttgctcatttcagggttgacattggacccaatgcttgaaactacttgcattgaaagtctgtgtgtccaagaatatgtcagactttctgagctgacctcactcttggggcaaaatcaaggatcagaatgtgtgcttcccaaaggccatgccctatgccatttgcccacttaaactctgcgaaaggattggaaaggctacaaactcaaggggataaaaagttgtaaaggatagcctggatttcactcatacttcattatgtaaaggcatctcaatgacagataatctcctttgtctccaaagggcaagctgtgaactgggtggaaatgtcagttgagacagaagagcagcaaacagctctgttttcctatagttgtggttttgcatggtgacgatgacacatgaagatgagaacaggtagcatgaactccagtcattatctgagtgaacatctctgccaacgctgaaggatatgtgtgggtgtcacctgcaagcacagagatggggagggagggagggagggagagagggagaaagggaaggagggagggagagagggagaacaaaagaaaatagaaggaagggttgagaaacaggaagttaactgcatagagcatctagcaattctacagcaacaacaggtgaaagctagcctttacaaaacttaacagcacagttactaaatattaaaatcagttgtattgctagcactagagcacacaatagttcttactgtcttgaaaacactattcagaacacccaaacccacagaggactgtgagagtcagcgaggcagaaaaccaaaaccaaaaaacaaaaccctgagtacagaaaggggactccagcaggattgaagggatcagatataactgagggagggagagggtagtggataaacatgtaaaagccacactacgtataaagcatgaaaatgtcatgataaacctattatgaatgtatgtaccgtgtatgtaaataaaaaagtgaagatgtaaaagattaacatgcctcttgaaagagaaactattagcttttccttaaaaagtaaaaaataaaaccaaatacaggttaaggtataatgtgttcacggacaaaagcttaatgtcttgattaactcaacaaatatagatttagcaactttcggtggtcagatctgactgtgagaagagacaggaagggctgctggaacccagggaatagccaggatctcaaaggttgccctcctgatactccctcattaagcttcatgtgatcgaagcctggaaggaggtgattaggggatagctggtaaagcctgtgttagggtggtagcaacttcctctgaattcaaacactctgtgctgggtgaaggctccttaagattcaggaagtaagcaactcaggccccttgcagagagctccaggatacaggcttcataagccaagctgggattcccttttcagagatgctgttgacactaaaagacccctgacccttaagccagggccctaaaacttattgggaagttcaggaagccagttttaggaactgcacaaaaaaggcaaatgatcctagccccgcagatgttacaaagataggcaatagatcctgtgggttaagaagcagcttattgaaaactggggacgtcattctcctctgagtgaacccccttctcacttcctaccctcaactatgaataacccagcatgaggtctgcagcctgcactctccggctccctggtgtttctggatcctgtaccctgatcacagtgcagccacatctgaagaccccacctctctggcattaaataaaacttctttagctctttaagctcagctaagttctcaccttttctttttccctacaaactcaactcttacatattcatacacatgcttttgtaagtaaatccacagggtctcaggttcatcaagtcggacttagtggacatttttgttgttgttgttctgcatttggggtaaataggtatttgttcatttcttcagggaagatcacacacaagaaggtattcccgcttgtgctgtgctcactgtggctgagctcagagcacgtgtctgcacatgcatgttctggagtgccaaattccaagcaggagaagcaggtaagtgtgtgtcaggcttgttgctgtaaaatgacacctttgatacaagggagagatgctgacttagcagataactaattcagtctgctcttctccatgccaaaaaatccaaagagagcagtggtggggctggacacaaacatgaggtgattggtgtgatccaagtgactcattaaaattagtcacagtgtgtaggaagccatggtgtaggaagtcatgatgtaggaggtcacaatttaggaggtcacagtgtagagtgtcacagtgtaggagctcacaatgtaggtaatcacagtgtaggaggtcgcagtgtaggaggtcaaggtacagggggtcactgtgtaggtggttatggtgtaggtgatcacagtataggagatcaagttgtagatggtcatggtgtaggtgatcgcaggaacccaagtctggagacagtttgatgatttgtccagctgtgcaaagttaaagaaaggatgggatgacttcgggtttgggccagcaccagtggaaggatattttacactctgaaatggagaaaacgtggaaggactgtactgtcataggatggcaggtagaaggtgtttgctttggagtctcggaagttttagggaagattaaagtgattgtgttgttaactgactatgagattctggagttggaaggagtgaatggagtctgagatgagcataaatggctgaaatgtatcagcatgtggaagatattttgacaagtgactctacaaagatgtagggaagctcttttcaagagtggtcccgggaccaggagcatcatttgttagaagggcagatcttcagacccagctctagacttactgggttgacaaggctcacagggcagttggaagcaagccagtgcctcccagccacagccccactgattccctacagaaggaggttgttccaagcactgagtcctgggagctgcacaggcttagagggtagaaccggctaagaaggaagagaaatcatgaaaccacactaagaagatagatttctgctgtagaggaatgtgttgatttaatgccatccaaaaacaaaaccttagatgttagagagcttgacagctgcctcaaagcatcctctaacagcgcaaagggccgaagacggatctgacagttgcgagaaactcgagtgtggaattaatctccgtgaaactcatgataactgtgggagctttgtatttgaatgaagtagcatttcacccggtgggaggggaaggcagcttaacaattggccagacatgtggaaatagataattttaggtctttccataacacatatgcaaaaatatattccagatggactagtggcctggatgtgatcagggattgcttgaaggaaaatctaagataatatctttattcctgtgtgatagtaaagaactcatcaagaaaatagatgaatagaatttgaacccagtaaaatgtagaacacttggatggtcaaagccagctccacagatcagggttaagggtttctagtggccccagaggcaaaatttgatatttggaatgtcagaaatatgaaaatgatgctctaaatgacagtggggaagaaaaaattctagaaatacttcaatgggaaatgcaaagggaagagcatggagcatgcttgacttgcagaggaatgaggaaatacacaaatgcaaacagcccggccttccctgccatgctggctgcaggagggaaaccccccagttgta

SEQ ID NO: 254 - DNA, 1492 bp, Mus musculus
acacactctgccttgctcacagaggaggggctgcagccctggccctcatcagaacaatgacactcaggctgctgttcttggctctcaacttcttctcagttcaagtaacagaaaacaagattttggtaaagcagtcgcccctgcttgtggtagatagcaacgaggtcagcctcagctgcaggtattcctacaaccttctcgcaaaggaattccgggcatccctgtacaagggcgtgaacagcgacgtggaagtctgtgtcgggaatgggaattttacctatcagccccagtttcgctcgaatgccgagttcaactgcgacggggatttcgacaacgaaacagtgacgttccgtctctggaatctgcacgtcaatcacacagatatttacttctgcaaaattgagttcatgtaccctccgccttacctagacaacgagaggagcaatggaactattattcacataaaagagaaacatctttgtcatactcagtcatctcctaagctgttttgggcactggtcgtggttgctggagtcctgttttgttatggcttgctagtgacagtggctctttgtgttatctggacaaatagtagaaggaacagactccttcaagtgactaccatgaacatgactccccggaggcctgggctcactcgaaagccttaccagccctacgcccctgccagagactttgcagcgtaccgcccctgacagggacccctatccagaagcccgccggctggtacccgtctacctgctcatcatcactgctctggataggaaaggacagcctcatcttcagccggccactttggacctctactgggccaccaatgccaactattttagagtgtctagatctaacatcatgatcatcttgagactctggaatgaatgacagaagcttctatggcaggataaagtctgtgtggcttgacccaaactcaagcttaatacatttattgacttgattggggaagttagagtagagcaatcaaaaagatcattcattcagccttgggaagtcaatttgcaggctcctggatgagccctgccccgttttcacttgccagcacatttcagtcatgtggtgtgatagccaaagatgttttggacagagaagaaaggatagaaaaaccttctctttggctaagttggtgtttggggtggggataggttagagtatagtacttaactatttgaaaaataatgaaaacacttttttcactcatgaaatgagccacttagctcctaaatagtgttttcctgttagtttagaaagttgtggacatatttttttaatgatttctgaccatttttaatcacattgactcatggaatggcctcaaagcaccccccagtgcttctttcctcattcccggtcatgggaactcagtattattaatagtcacaacatgatttcagaactagatagccctcccacaccaagaagaatgtgagaggaagtaaggtcactttatgtaaaaacg

SEQ ID NO: 255 - DNA, 657 bp, Mus musculus
atgacactcaggctgctgttcttggctctcaacttcttctcagttcaagtaacagaaaacaagattttggtaaagcagtcgcccctgcttgtggtagatagcaacgaggtcagcctcagctgcaggtattcctacaaccttctcgcaaaggaattccgggcatccctgtacaagggcgtgaacagcgacgtggaagtctgtgtcgggaatgggaattttacctatcagccccagtttcgctcgaatgccgagttcaactgcgacggggatttcgacaacgaaacagtgacgttccgtctctggaatctgcacgtcaatcacacagatatttacttctgcaaaattgagttcatgtaccctccgccttacctagacaacgagaggagcaatggaactattattcacataaaagagaaacatctttgtcatactcagtcatctcctaagctgttttgggcactggtcgtggttgctggagtcctgttttgttatggcttgctagtgacagtggctctttgtgttatctggacaaatagtagaaggaacagactccttcaagtgactaccatgaacatgactccccggaggcctgggctcactcgaaagccttaccagccctacgcccctgccagagactttgcagcgtaccgcccctga

SEQ ID NO: 256 - DNA, 51365 bp, Homo sapiens
tctccatgttggtcaggctggtctagaactcccgacctcaggtgatctgcctgcctcagcctcccaaagtgctgggattacaggcatgagccactgtgcccggccacatacaggtttcttacatgcatatattgcatggtggtgaagtctgggcttttagtgtacccaccacccaaatagtgagcattgtaccccataggtaacttttcaaccctcacctgcctcccacctcccaccttttggtgtctctaatgtctattatttcactctgtatgtccacgtgtacattgtttagcttcctcttttaagtgagaacatgtgtgtttgactttctgtttatgagttatttcactaaggataatgacctccagttccatccatgttgctgcaaatgatttcattatttttttggctctgtattattccatggtatgtgtgtatgcattgctgcaaatgatttcattatttttttggctctgtattattccatggtatgtgtgtatgcgtatgtgtatgtgtgtgtgtgtatacattatacaccttttgtacgtgtgtgtgtgtgtgtgtgtgtgtgtatatatatatatatacctccaatgtatagctatagcccatattctttattcaatcctctgttgatggactcttgtgttgattccatatctttgccactgtgaatagtgctgtgctaaacatacgagggcaggtatctttttgacgtaatgatttctttccctttgggtatatacccagttgtgggagtgctggattgaatgctagttctatttttagttctttgagaaatctccatactattttccataaaggctgtactaatttacattcccaccagtggtatacaggcattctcttttctcctcatgattattggctgtttttagactgtttattaatagccattctgactagtgtaagatggtatctcactgtggttttaatttgcatttctctgatgatcagcaatattgagcattttttcatatgtttgttagccacttgtatgtcttgttttgaaaaatgtctgtttaacaagcaaatgctgagggattttgtcactaccaggcctgccttacaagagctcctgaaagaagcactaaatatggaaaggaaaaactggtaccagccactgcaaaaacacaccaaaatataaagtcaccatgaagaaactgcattaactaatatgcagaataaccagctagcatcatgatgacaggatcaaattcacacataacagtattaaccttaaacgtaaatgggctaatgccccacttaaaagacacagactggaaaactggataaagagtcaagatccatcggtgtgctgtattcaggagacccatctcacatgcaaagacacataggctcaaaataaagggatggaggagtatttaccaagcaaatggaaagcaaaaaaaagcaggaattgcaatcctagtctgtgataaaacagactttaaaccaacaaagatcaaaaaagacaaataagggcattacataatggtaaagtgatcgatgcaacaagaagagctaactatcctaaatatatgtgccctgaaaacaggagcacccagattcataaaacaagctcttagagacctacaaagagacttatattcccacacagtaatagtgggagactttaacaccccactgtcaatattagacagatcaacaagacagaaaattaacaaggatattcaggagttgaactcagctctgaaccaagtggacctaatagacatctacagaactctccatcccaaatcgatagaatatacattctttttagcaccgcatagcacttattctaaaatcgaccacataattggaagtaaaacactccttggcaaatgaaaaaggacggaaatcataacaaacagtctctcagaccacagtgcaatcaaattagaactcaggattaagaaacgctcaaaactgtgcaactgcacggaaactgaacaacctgctcctgaatgactactgggtgataacgaaattaaggcagaaataaagaagttctttgaaatcaatgagaacaaagacacaacgtaccagaatctccgggacacagttaagcagagttaagagggaagtttatagcactaaatacccatatcagaaagcaggaaagatctgaaattgacaccctaacatcaaaagtaaagtaaatagagaagcaagagcaaacaaattcaaaagctagcagaagacaataaataactaagatcagagcagaactgaaggagatagagacatgaaaagcccttcagaaattcagtgaatccaggagctggtgttttgaaaagattaacaaaatagatagaccactagccagactaataaagaagaaaagagagaagaatcaaatagacacaataaaaaatgatgaaggggatatcaccactgatcccacagaaatacaaactaccatcagaaaatactataaacacctctatgcggccgggtgcagtggctcacgcctgtaatctcagcactttaggaggccaaggcgggcggatcatgaggtcaggaggttgagaccatcctggctaacatggtgaaactccatctctattaaaaacacaaaaaattagccgggcatggtggcaggcgcctgtagtcccagctgctcgggaggctgaggcaggagaatggtgtgaacctgggaggcggagtttgcagtgagccgagattgcgccactgcactccagcctgggcgacagagcgagactccgtctaaaaaagaaaaaaaaaaccaaaacacctctatgcaaataaactagaaaatctagaagaaatggataaattcctggacacatacaccctcccaagactaaaccatggagaagtcaaatctctgaatagaccaataacaagttctgaaatggaggcagtaattaataccctatcaaccagaaaaagcccaggaccagacagagtcacagctgaattctaccagaggtacaaagaggagctggtaccatttcttctgaaactattccaaaaattagaaaaagagggattcctccctaactcattttatgaggccagcatcatcctgataccaaactctggcagagacacaacaaaaaaagaaaatttcaggcgaatatccttgatgaacattgatgccaaaatcctcaataaaatactggcaaaccgaatccagcagcacatcagaaagcttatccaccatgatcaagtcgacttcatccttagcatgcaaggctggttcaacatacacaaatcaataaatgtaatccatcacataaacagaaccaatgacaaaaaccacatgattatctcaaaagatgtggaaaaagctttgataaaattcaacaccgcttcatgctaaaaactctcagtaaactaggtgttgatgaaacatatctcaaaataataagagctatttatgacaaacccatagccaatatcatactgaatgggcaaaagctggaagcattccctttaaaaaccagcacaagacaaggatgccctctttcacactcctattcaacatagtactggaacttctggccagggcaatcaggcaagagaaagaaataaagcgtattcaaataggaagagaggaagtcaaattgtctttgtttgcagttgacatgactgtatatttagaaaacctatctgtatttttagaatgctgtatatttagactgtatatttagaaaaccatctcatgccagttagaatggcgattattgaaaagtcaggaaacaacagatgctggcgaggctgtggagaaataggaactcttttacaccattggtgggaatgtaaattagttcaaccattgtagaagacagtgtgtcaattcctcaaggatctagaaccagaaataccatttgacccagcaatcccattactgggtatatacccaaacgattataaatcattctactataaagacatgcacacgtatgtttattggagcactatttacaacagcaaagacttggaaccaacccaaatgcccatcaatgatagactggataaacaaaatatggcacatatatgggctgggtgtagtggcttacgcctgtaatcccagcactttgggaggccaaggcaggtggatcacctgatgttgggagttcgagaccagccagaccaacatggagaaaccccatctctactaaaaatacaaaaattagctgggcctggtggtgcatgcctgtaatcccagctacctgggaggctgaggcaggagaattgcttgaacctgggaggcagaagttgcagtgagccaagatcgtgccattgtactctagcctgggcaacaagagcgaaactctgtctcaaaaaataaaaaaataaaattaaattaaattaaaaaaaagaaaatatggcacatatatactatggaatactatgcagccataaaaagaatgagttcatatccatcgtctcagcccaaaaactccttctgataagcaacttcagcaaagtctcaggatacaaaatcaataggcaaaaatcacaagcattcctatacaccaataatagacaagtagagagccaaatcatgagtgaactcccattcacaattgctacaaagaaaataagatacttaggaatacagcttacaagggatgtgaaggacctcttcaaggagaactacaaaccactgctcaaggaaataagagaggacacaaacaaatggaaaaacattccatgctcatgaataggaagaatcagtaccatgagattggccatatggcccaaagtaacttatagattcaatactattaccatcaagctaccattgactttctttgcagaattagaaaaaactactttaaatttcatatggaaccaaaaaagagcctatatagccaagagaatcctaagcaaaaacaacaaagctggaggcatcctgctacctgacttcaaactgtactataaggctacagtaaccaaaacagcatggtactggtaccaaaacagatatatagaccaatggaacgaaacagagacctcagaaataacaccacacgtctacaaccatctgatctttgacaaacctgacaaaaacaagcaatggggaaaggattccctatttaataaatggtgctgggaaaactggctagccatatgcagaaaacttaaactggtccccttccttatagcttatacaaaaattaacttaagatggattaaagatttaaatgtaaaacctaaaaccataaaaaccctagaagcaaaccaaggcaataccattcaggacataggcatgggcaaagacttcatgactaaaacaccaaaagcaatcacaacaaaagccaaaattgacaaatgagatctaattaaaactaaagagcttctgcacagcaaaagaaactaccatgagtgaataagcaaactacagaatgggagaaatttttgcaatctatccatctgacaaacgtctaatatccagaatctgtaaggaacttaaacaaatttacaagaaaaaaacaaccccataaaaagtgggcaaaggatacgaacagacacttctcaaaagaagacatttctgcagccaacaaacatgaaaaaaagctcatcatcactgatcattagagaaatgcaaatcaaaaccacaatgagataccgtctcacgctggttagaatggcaattattaaaaagtcaggaaacaacggatgctggcgaggctgtggagaaataggaactcttttacgctgttggtgggagtgtaaattagttcaaccattgtggaagacagtgtgtcgattcctcaaggatctagaaccagaaataccatttgacccagcaatcccattactgggtatatacccaaaggattataaatcattctactgtaaagacatgcacacgtatgcttattgcagcactatttacaacagcaaaaacttagaaccaacccaaatgcccatcaatgatagactagataaagaaaatatggcacgtatatactatggaacactatgcagccataaaaaagtatgagttcatgtcctttgcagggacatggatgaagctggaagccatcattctcagcaaactaacacaggagcagaaaaccaaacaccacatgttctcactcataagtgggagttgaacaatgagaacacatggacacagggagggtaacatcacacactgtgacctgtcagggggtggggatcaaggggagggagagcattaggacaaatacctaatacatatggggcttaaaacctagatgatgggttaataggtgcagcaaaccaccatggcacacgtatacctttgtaacaaacctgcacgttctgcacatgtatcccagaacttgaagtaaatttaaaaaaacaaaaagaaagaaaaatgtctgttcatgtcctctgcctactttttaatgggattgtttttttcttgttgagttgtttcagttccatgtagattctggttattagccttttgtcagatgtttagtttgcaaatatttttcccattctatagttatctacttactctgttgattgtttcttttgctgtgcagaagctttttagtttatttaagtcccatgtgtctattttgttgcctttgcttctgaggacttgttcataaattctttgcctcggcagatgtaaaaaagagttttttcttggttttcttctgggatttttatagtttcaggtcttacatttagggctttaatgcatattatgttaatttttgtatatggtgagaggtatgggccccgtttcattcttctgcatatagctagccaattttcccagcaccatttattgaatagggagtcctctccccagcatatatttttgttaactttgttgaagatcagttggttgtagatatgtggctttatctctgggttctctattctgttccattgttctatgtatctatttttatactagtaccatgctgttttggttactatagttttaccatgtaatttgaagttaggtaatgtgatacttcaaagctttgttctttttgcttaggattgctttgactattcagctctttttggattccacacgatttttaggattgctttttcaaattctgtgaaaaatgacattcttttgttctgacaattcttaaccccacttcagaccagttttctcatctgtaaaatggagataataataatcttcctcacaggttgtgtattaaatgagatctggaatgtaaagttcttagtatggaaatgctattatttttactgaaaatgttgtagggtctcagtatcctgtgtattgccggatttaaggtccttattttatttctgtcatttctacctcttggtatatgtgaatgctattggatttcaaaagcaaatgtgaaaggattctaatgaaatggtttgcttctttagtgtcatacatgttaaaacataggaaggcaaatgtcaaagtttgtgtttctttttattctatggaaagaaaattaaatatggctcatcaaataataaggccaataatatttaattattgttttgtgaattcgtataaatgagctgacctctctgggctgcagcttccttctctgcaagataagggaattaggccagatgagtgaactgtttctttttcagctaagtttgacccgattactactatttacatagtattaactagatgctatgtagtcatctttaatatgcttgaagacagttattaactcactccttagccttttgttgttgatcatggaaaactactgggtatctttgtttcttctgtgtatattctcagtatgtataatgagtctcagagcctcttgttttaagatctgggtaggctggtggctctagaatatggatgaccttttaggaaaggtcaccttgccatctgtaaattttcccccagatagacttcaggccctggggaaggcatgggttcccctaactggatagaggatcagagccaggaagactgtgtcaaattctagaagtgaatcttctccaggactcagggcatagctttgtcacttacctatagttcagaagtgtgagtgaatcatttccaaggacaaatttctccaaaggaccaaaagatgtgttagtaagaggggttcacaaagactgtgtttgtgggaaaattgaagtgtgaacaaagaaggtctaccaggacaggaaatacttttgatctgtcatttatcagatcaggagggagggacatgaagcctgcctcctcttacagctaggtcatcaaagagtttgactgtagcattttaaaatagcgaagaaaaaaaggtaacaacactaggggtttgttaaacaatttatgatataattagagaatggaatattatgcatcaattacaaataatgtttataaagatacttaaatgacatgggaaaatgttcaagatataacaaataatagtacatatctgatgaaaactataagtaaaacatgatattaaacatgtaaaaatcttaacagaccaacaggtggaaggcagtggaccagaatattagcagtgtttatattagggtggtaagaatgtggatgaatcttgttttaatgcttataatttttctaaacattctcaatgaaatatgccttacttttatagtcagaataaaaagcaatacaagttatcttttaaaacaacccacatacacaaaacccccaactagagtaattgcacaaagcttagattatcaaaaagaagaaaaaaattactggaaaagttttgaagaagtcattgagtacaagatactgacgtaggtgccggaagaagagagcagttggccgtgctggtggaataaccctctctgcaaagggcctgggagttgaagaagggtgcagtcgggtggtggttatgaatctcagaaatcctgccacggagcctccttttgtgccctattacttaaccttgagggacatagagagcatgagacaccaaggggcttttggttgccttactgtcccactaagaacatagaatgttgttttgactttccctttgcttagggaacctcccccagatactcagctggctggctgcttgcacgtagaatgggttttgcaaagttcctagaagtgagttggaggaggcttgacataaatcaagcactgtgtgctaaatgctccagagggctaccttatgtcctacacaaatgttacatttctaatatttgtaactcctttaaacgtttatgcagatgtttcccaattcctcagtagaattcttaccattatctttttgacacaacctgtccccatcctatgaaaatctctcctctgctagagactttattctttctttctctctctcccccttccttccttccttccctccctccctctttctttctttccatctttctttctttctttctttctttctttctttctttctttctttctttctttctttctctttctttctttcttttctttctttctttctttctctttctctctctttctttcttcctttcttttttctctctccccttccttccttctttccttcttttcttttcttttcttttcttttctttctctctttctttctgtctttcttttctcattctgttgccctggctggagtgcagtggcatgatctcggctcatagcagcctccacctcctgggttcaagcgattctcctgccttagcctccctagtagctgggattacaggtacccaccatgatgcctggctaattttttgtattttcaatggagacggggtttcaccatgttggccaggctcgtcttgacctcctggcctcaaatgatccacccactttggcctcccaaattgctggcattacaggcgtgagccactgcacccggcctgttccttcttaagaacactttgtctcccctttaatctctgctggatttcaagcaccccttttacacaactcttgatatccatcaataaagaataattcccataagcccatcatgtagtgaccgactatttttcagtgacaaaaaaaaagtctttaaaaatagaagtaaaagtctaaagtcatcaaaacaacgttatatcctgtgtgaaatgctgcagtcaggatgccttgtggtttgagtgccttgatcatgtgccctaaggggatggtggcggtggtggtggccgtggatgacggagactctcaggccttggcaggtgcgtctttcagttcccctcacacttcgggttcctcggggaggaggggctggaaccctagcccatcgtcaggacaaagatgctcaggctgctcttggctctcaacttattcccttcaattcaagtaacaggtaaacaatgttaatgtctttctttctgtaaatattttttgaggtcttccaattggcttagtttattttaaatttctaacaatgtgtgaaatttgaacatttgaagtgtagttttgctgtaatagggcaatgtgttattttgaaaatcattgattctcagactacaatatagtatcttaacaaaagtcccttggaaataaattttctaagctattagtttctctagctattagttgatagtgtcccaagaatttattattattattattattttaaattgagatggggtttcactatgttgcccaggctggtctcaaacttctgagctcaagcaatccacctgcctctgcctcccaaagtgctagggttacaggcatgagctaccatgcccggccaataatttttaatttatgtatcgtttctttctttctttctttttttttttaatttaagaaagctgctgtaagtagattggctctggaagctctgaatttaggttgcctatgttcctaacacaggtccaattctcactagctaagcttaggcttagctattatttaaactctccaaacctcagtttccttaactgtaaagtgggaataataataaacctcacctcaaggtcattgtgaggtaaaatgaaataatccatgcgaagggcttagctcagtcaggcttcaagataaatgtgaactgtaattactctatctacctgaattgaatgagttccaacatgaattctggagtcaccacagaagctgctacaacaccaatattaataaattagttttcttttacaatcggccaaaatgtattttcttagattaaaattctttaagttcccaatgacgatgatgaggaggataatacatctagcactttgagcagcacacagttctcgtaactagaaggtaggtattacagttaacttcatttcagatgaagagactgaggggtaggcacattaagggatttgcccaaggatgtacaggtggcagctataggaggcagggtctgaaccaccttagtctgactccagtgccggtgttgttgattattatgctattccatctaacatggtgtgatttgtaatttcatggactcaggtaaatccagggttaaattaacttcggaaaatcacaagcacaattcctaacagaaagaatttgttacttgggtgggctggagtaagatgctcattcaacgtgttctcagagttagaaaaaggcccccgcttggttcaaaaactggactgataggggtcaacagtcatgcttaaataaggacagttatttttccctgaaagatacattgaaaagccagtatcctcaattttctttcttattttggcagtacagagactgcattatttgttgttattcttaaacattaagtgtacatagcccaaagagtataatttcccaatctgcagaggtacagtagttgcatatatacccgtttattttatggtctgacgtaccagtgagcacaaattgtgtatatttataaaacgtgttgatataatgaaagacatgagttggcaatgagatctggtaccaagcgtttacagctaccaaatatattctacaagaatctttaacatttattttaaaaaggtcaaaccttatttttaagagatctctcaaacttaaagaatatttaaaattacttaatttgttagacagtcaagggaagcctaccctgactgaaaactatttaaaattggtaattgtacactaaatacttttctgatgtgctttgtggacacctatctgtcatcaacttattcactctcttttgaagagtttttggtaagactcaaaactttgtatgttttctttagaacatttattaaaaggggactagctagataagtggttggagagttcacacacatagggcctttgttttctactttgacatatatttacttttcaaatgccaattcacttttctagtaacttttagcatttgatactgagtggctatctaatgaagaaggaaagagatgggagtgaaggggacacttttacagtcttttccagtaagaaaacttacgagcaagaaaagaatgaccacataaaaaatgtatgatttggcctggtgtggtggctcacgcctgtaatcgtgggacgctgaggcgggtggatcacttgaggtcaggagttggagacccgtcgggctaacatggtgaaatcccatctctactaaaaatacaaaaaaattagcagggtgtggtggcatgcgcctgtaatcccagctacttgtgaggcttaggcaggagaattgcttaaacccgggacgcggaggttgctgtgaacttagattgcacccctgcactccagcctgggaaacagtctcaaaaaaaaaaaaaaattatgctgcattctaatcaaatagtgcaaagcttcttgtgtgctttgcctttctctgtacacaccttccattaagaaattatagatagggaaattctctggtcaaagtgtaactgtccttcctaggtctgagaaaccactgttatgcctgtgttgagatgtgtatctgtgtgcgtgcatgtgtgtgtatgtatgtatatgaagaatagttcttttttccattaatttaataatgtgtgtgtatgtatgtatatgaagaatagttcttttttccattaatttaataatgtaacttatttgtttacagcatagcttaaaatatttattctataaaggttaagtctaacctgattccttatgagttggatgacagtgtagagagatatttatggctaagttaaagaagtgtgatttaggaagagtgaggaaaccttaacttagataagccctttgcatgttttctactagactcggataattgtgcaactgagatccacagagagtattttgctggactttgggataggagtccagcccagaactacagagccttaagagggaaatgctctgggattgatgatagaaggatggtatgcacaaaatacttgacattggtcacatgtttcaggccatatttgctattttttagcaagcctaatcatccagtgtgaagagaaaaatcagcatattaccacttatttttccatgagatcattccttttcacttctccaaaacttgggcaaaaaactgtcaaaatggccagtttggacaaagctaatttctccagcgccttcccttagcgcttatttttctgagagaggcatggaaagcaggaaaataactgacatttaataaaaagtcatcagcaaagcaattaaaaattttatttgtactctagtcttcagccaatgactcccctgagctggttgtatacggaaagaagtaatttgtttctcacagttaagtgttgctctgagactgggcttgggaaagtaaggtgaaaagatgaatgtcaaaaaatcaacagattgccgtatttacatgacttccaatatgctgtggccagtttttctgttaaaagaaattgactggatgtttttgtcatttcaagtaaatttgatggatatttcaaaagtataggcattgcttaaggatttgttttactctactaccgtgccctagttaacacattgtgttttttaaggcaaccatccagcaaggacgtttacagcaaggactgcaaaattaatatcaatatatcaataccaggaaatggaatgagtcattgccacagatagattagaaatagaaatgaatctgtgattgtaactccaaagctctcacattcaaacttttactatgggtggggagaggatctcgctgcctccccttctttaagacatagaccctcctcctttttaacgtcttatgccttttttcaagggtggagaaatgccatatgattaccatttggcttttatcttgtgtggatatcttcctccaagtatttcctgcaagcagtgtgctgacatttacaaaaggaaaatttttatgccaccaacatcccagaagaaaatttgttgtggtttatcatctctaacacaaaagccctttattaactagtgtaggcattgatgaggatacgcaattcatgtcagacttggttgtctaaaaatcagaggacggacactccttcaaagcacaattgtttcccagcaggtcatggcaagggatagaatcttcttctctttctcatgttggttaaatttttgtttgcctttttcttcaagaaatttattatttatggaacttcacagaggctggaacttttcttctcagtacatagttgagctgagcatctggaaaaattacatctgggtggttttgtgactgactgaatggctctctggttaagctgtgttaagatatctgtgtctcttttacggtgatttatttggccgtttttggccaatgacagggtgttagcaccaaaaacccaaaaccaaaaaaaccaagacaattcactcagagctttgagcctgataattatagcatgagaattggtgcctgaagctggggggaaggtaacccaggccccacagagaggtggttgcatgcaagtgtctaactttttccttgttaatctcattttgaggactccaaacactagaagagaagtgcactggataggatcaagaactactcagtcatttggtagaggcttggaaaaaagagtttagacttctcactatttcaatgttaatttcaaaggcatgtttatttagtctcgtgtcaccatgcaggttatatgtgcttctgttttcattgctggaagagaacctgcaaggtggtggagaagttcttacttaactttgagctgctcccttatctctgcattaccattactgtcatctttttctttgtcatcatcttcattatcttgggtattgtggctgacaatataaccaggttaatggttcctgatggtatcattcagaattactcactcatagttcactttggcctctgatctaattgtgagcccctttctgcaatatctgaatcacctcattggctcacaatccaccatgtaatctacttgtctttcatgttagacttttcgtgaaagatccacctcctcgaagaagcttctggatacttcagcctttattgtggtcttggaagaggagttctgatggaagtgtatctcaacttaacaaatatttattaaacctctcatattttaatctccatcagagtttcagagaatataaaaagaaatataggccggatatggtgcctcacacctgtaaccccagcactttgggagaccaaggcaggcagatcacctgaggtcagaagtttgagaccagtctggccaatatggtgaaaccccatctctactaaaaatacaaaaattagccaggcgtggtggtacacacctgtagtcccagctactggggaggctgaggtaggagaattgcttgaacctaggaggcagaggttgcagtgagcagagattgtgtcaatgcactccagcctgggtgacagagcgagattccgtctcaacaacaacaaaaaaaaagaaatataaaatcagtacacaagtattgtgtagtacaagtaattaggtagttaactgagttctctctgcttttacagcccctatgatttagttgagtaggttatatataataggaggatgtaacatctggaaacagataaataacacttggcagtcactacctcaccatgctatttgatgactaaaggactttggtttgcctacattatttttataatctgaaatgtcctctacacctctcacctgaagaagccttctctgagaccccaaatggcaaagagagggacttccttccctctcaagtttctccaaattattactgtgtattgacacatttattttcttttccactagactatgaactccttgagggcagaatcatgtcttattcatccttctaacctctgtattaggcacaatgctgtaagcatatagttactcaataaatatttgttgaagaaagaaatgaatgaattagtaacaaaatgaggaagcataaaataaatactcgtaagattaatgtagaaaggtaagcctttatggagagttgggaattagactggacagtagacaagatttgaatgaacgttgttattaataataattgctagctaacatttattttgcacttataatgtgccaggtagtgttctgcctggctttccctgtattaagtcatctaatctccaagtcctatgaggtagttactatgattgctatgattatactatttcatagatggggaaactgaagcacagagtgggtagagcatcttgcttatggtcacaaagctactaagtatgtaaatccagatggtcttgctctggggttcatgttcttaccaatgctgtgttgtctcaggaaggaaaaggtggattaataaagaaattaaaccaggaatactgtttcatgttctcagaacagatggcaactctgaatgtgtgaggttatggtgaagcagcggagaatccagttaagcaaaggatagaatactggtaacagaaattcaaactttattttcaagtcattttgaagtaatggcctgggtaagaagaaaatatttcagaatccttatctttggaatgaagctggagttatgggaatggatggctagtcgaaaggagagggcataactgtagaaaaacagagagtggagctgaatctggaaactaactggctctgatgggagtcagctgaaaaggatggttagctagtgaaggagacaaagaaagtggtgagagaggcagggggacacagtgaggctagtggaatgccactaagccaatgagggaaagagtttcaaaaagatagtggttaatagcattaaacataagagggaaaggagtgaataatggcttgggatttggctgaaacgccacctgggacttttgagtttaggcagagacatggagaaggaagataagacttcacaggattaagaaaaagtggagggggacaaaacagagacagtgaaaaggagaggaaatagataaggtaaagacaattaggaacttatatcacctaaaatgtctaccatggtattttgtgcatgtaataataaatgtttgcaaatggctgagtgacttaagtatgtttgacatgtggaaggagccaagtgctggacctgagagagagagagagagggagagagagagagagagagagagagacagagagagagagtgtgtgtgtgtgtgtgtagcattgcagggcttgagggtagagaagggtattattaggaaagaaaggaggaggagggagaggaaaaaaagagggtggggatagttttctcaaggagatagggagggagatttgttgcataggagatgagtgtattagagagaggaggacaaatctctaagaagatggggaggaagagaagagacttataggggtagagataagttagaatgaagctatggtagatgagtgattctatactggtgaacctgaggttaaaaacaaacaaatctctcagagtaggtcatgatgttaaacctatatcaacaagggctactgggtaatacatgccttctctctgaagactttgcccatgtgtactttaaattcttgcttgagtcctcaacaatgcacactatggctaggcttgacctcagctcacggctgagatcacagggtcacagggttcaaaccaaccctgcccaacattatgggcgggactccagtttccagtcagggatgttaatcttagcatttccctgtgtgttttggaacaaggatatggttgcttgaccttggcttggggaggccagtccgctattcttttgccctctcttttttcaaactcaaaagctaatcccaaggatttctcaaggtgggggatgtgattaggagtattagtctatcatactgtgacagaacttttctaggcctcggtttcttcatctgatacatgaagagtttgggctggaggatatctcaggtctactttctggcttaaaagtgcttctgaagtggaattttttaaaaagctaacttttgtcgggtctaacaaggcagctcaactaccccatccccttgtggatgctcttatgacctgatagagcaaatacaagaaattagaaaccagccatctctgaaatcccttgcagggattgctaaccaggatcctaaatgctgctaatgtgcttagaaatgactgctggacttcgagggggcaatgctgcctttgctatctcctgttttcctatgcaatgttaaggtccaacacagtaattatttaaacttctgggccatgacatttacctggaggttctgtatatgacaaggtgatcctgagcagattcttcagaggtatgtgatttaggcagaatggaacagacaggaaaaatgtactgttgtcttcatcacagagttgttttgaatgagggatcaggataattgtggctcaggaggaaaatatggctctcaaatttggttactagattaaaacatatatttagaaaataataaattaatagaggaggtctctttatacctgtgggttttcttttgatccgttaactgaattactataataatatatatgtacagaaagctataattccctggttacctcctatttagactacaggcaaccttttagaatagtgagatttgattttggggagttgtctggtggctcttggtatgggttccactttcatgtaagttaaggtgctcttgctatgttgtccccttagattgtctttctaacattaggagatcagaggaaaattgcagacctgacctgtgaacggtagggattgggtcacactgcatctgagtttatgttgctttgggttaggaagttttggtcccagagcactcacatcctgcattgctgtgtggtgtctctgagtggtagggatgggttacagcacaggtgatggtttttagcaattttaatattaactgtcatcctaatacatatgaacttcctaatgtacatttctatccccaactggcttcctcgaactctagtcctatacttctaactccttctggatctttcctccaggatgaacaaatttcctcttaacttacctcattttgtcaatggtgcctccactcatacccttacccagtgcgtgaactctgggtcggtttccattcctgttcaccatcagtctgtaaaactgagcaccaatgccttgtttgaccctttcataccagctgccacctccacagctcaggccttatgaactcacatcagtgctattgcatcagcctcctgattggtctctgcctcagctcttcccttgctccaagccaagggcagtcaagattgcttgctgcactcctcaaggctgtgctaaccttcccaaagcagcatgtaccacaacattctcaactcagacatcttcagcatctcccatggcctttctggtaaaatctatgtgccttttcttggctccccatgactggtattggccatcttcacctgtttccatcctacataaatggaatactctgccagttcccaataaactctcacactaaggtcatttccatgatcttagcctgtctaaatttgccccagaccttatggcccagctaaatgtgaagtctctacaaaagcctccagaatcatcctgtctggaaacaaggcttctttcgcgtgcctgtcaatgaccctttaaagggttcatgtaccacggatggcttcggagagtagctgattgtgtacctgccttcggatttctcctagaatgaaacagctctgtcttttacatcttcccatctcctaagaatcaagtacattaagtcccttatttatttgatgaataaatgaatgaatgacgctgtcacagcagaagtcagaataccaaaggacgattctgtgacacatcaaaatttcttctcagaaagtactcattgattgtttttgataacttttccctctcaaaaatgaatgccttaggtcttggtgctcatatgggactttttgctactgaactatctgacctttgacttactttctgacagttacatgtagcacaataatttttttaagaggacaagaacaagtgtcctctacattatagtgtctgcctgtgtaggaacacaaataaaggttaaaggtggggcttagattagtgctgaccaaaagcaacttctttactaaattatttatttatttgagatggggtctcactttgttgctcaggctggagtgcagtggtacaatcaccactcactgcagccttgacctcctgggctcaagtgatcctcccacctcagcctcccaaggagctgggactacaggcacatgccaccacagccaggtacccccacacccagctaatttttgtattttttgtagaaatggggtctcgccatgttgcccaggctggtttccatctcctgggttcaagcgatccacctgtgtcatcctcccaaagtgctaggagtacaggtgtaatccactgtgccaggcctttagtaaatttattaatcaggattctatttctatttatattgttacctataatcatttgtccttgttcaaactaaaacctctttagattttgttttaaaaccatactttctgtcaagaacagttaatgtgcttggtataactgatagttgtgatatacacaatcttggccaaagctggttgcttggtctgcttctcttgatggaagtcattgcttctgtcatggtggcctccactacacaactctcttgccttctggttctggtaacttcgctgtcccctggtctctttcgacctaagggtggtcataattctgctgctgcaagtcacaggctctggcactacccctcgtggttctgctcttgccacacctttgccaacagtcctttcataaataaccttcctactcttgcccaattttgtgtgtgccatctgttttcatttgggatctggaatgagacaacatatagttggcccactgtatccacgggttatgcatctttggattcaatgaaccatggatcaaaaacagtatttgtgggatgcagaatctatggatacagaggaccaacaattgcatgacttgagcttccatggattttggtatctgcaggggtcctggaaccaacaccccatggatccagaggaccactgtatatgcatgtttatcaagcttattcaaagccccctttttctgtgtgaagagattttccttaaatcttcatttcttgtgaaaatgggaagactttcaagataacagtcaacagaaaactagatgaaatgaccacagaattatttttaaaccataacttgcattattatcattattattaccattttttcattttaacatgaatttctgggagagagaggctgggtccattcaaagcatggtaggtcatgaatagctttgtttttatcttcattgcagctcagagaggatggtgaaaggtgctacagtctggtgaatgttttgtacttctctttctcttatcagaaggaagccaggccaccagctaaggttatcagagccatagactgttgagtccccctttcttctcagggagcacggtttgtctcacagtttcctgagcaaccaccgggttgtcttgtgggggagcctaccccttacagagcctgaaaaggagccagtggtcagatggtcacgtgttgaagggcatcctgggcctgaacaggaaatatactcagaggaaagttacagtaacttaactagctctgtggtcaggagggaggtgctcttctatgccagggaaatcagcatcaccttcacagtgtgctcacaaatatcacagggcaaaatggctgaaagtagaagctttcattgtttttggttcctacctaacatgtgaaattctgttcagtccgaatttttaaaaggaaacaagataattagaatcttacaacctgatttttcaactgcaaaagaaagtcagactatgatgtgcataaatggaacctgataaagttcttaaagattctggaggaaaatcacattttgctaattaatcatgtattccagctctctaactgcttctttagcttcccagtacgttttatttctctatggtgctacgataaagaaaaggaaaaactatgacaaacaaatgtaattcacaaaagccctgaagttaaggattttcctagtgaagttcagactgaaatgtgatttcatgtgttgactcatgtctatgttcaatcccttttgtacacttgggtaagctagaatggaagatctcaatggtataattattacttgtgcatcagaaataatttataagattatttgatgtgatcatactgtctgtaagccttatctgggatccatctatgaccttcaggaaatcttcaaaattgtaagcaaaatgttttgtatatgtgcattagaggcaaaaaatttggaaatgtatttttttctagatatgagcatgaaataaattcagtcttgctgaatgaacaaagttgtttttctgtccatttatgatttaaaacattactcctagatgtctaaataaataaattacatcttagctcttccattatttgtgtgaccttgtttgaaaagtcatttacttcttctctttttttccccccaatagcctcttctttaaaataaggaattggcatagatcatctccaagttcccttccagttgagtgtggttttttgcaggataagactctaataaaatagtggggaaaatgaaatgtattttgttctggtcctcttcccattccattcactcccctacttaatggtaatctcctccctaaccctcactccagacatctggtaccatcctccctatcaagtccaactttgagaggatctagaaccaatcactgcaattgtgttgaaattttgatgcaacatggcagaaggaaatgaacaatagattagaagtcataagttatgagcttaaatttcaaggatcacttatgtttcctgtaaccttggacaactcatctacctctttgacctcagtttccccatctgtaagatgggcataaagatgactgtcctgcctatttacttcacagttgaatatagagttcagatgagataagagacagcattttatagccctgtgaatgtaagccatagatactaaattaagccaatgtgtttcccatattgcattttgggcttcattttctttggaaatctaagcattaactgagctggtgggagggtccttttaaggtcagggttctttgatgctgggagccacaccttagaggtggttaccaccccacctatgcagagggttgacctcattactaaatatggtaattgacccgtttataataggtgtaaacggcaagagttgtttttttttgtaaccaagcttccccaccacccactgccattctcatggaagttcaagcaactttcaattttcctgaagtcggctgtttcacaagattcacagattatctgtgggaaatcttttagctctcagtaccttgctcacaagcagcagataagtaccttctcacctccaatctcactcttcatgttgcctgttgttaagcaggagctgtgagggaaagaggtttgaggttagtgcttcctgtctccacacctttagctggtttagctgctaggaaaggctttgaaaagcaaagcactaaattcaccttcaaaacaacttgtcaattcagttagagaaatgtcagtcagaccaatcttttgataacgtaagcaaagaaaatggatgggttgacaatgtttcttttaacctagtaggtttgacctaggtagaccttacctgaacactcacaagaagtaaaatcaaatattcacagggaaagggctgggtctcctgatacccaagtagcctaagaagaatgccttccactcctagcatgaactggaaagcaaaaagaaatcaaacacaagttaggacgagggagctacatatttgggtttcttctgagtctagatatgtccttacatttgtaatatgtccttacattatttgaagtactgtggattttcagaaactcagagaccgaaaatacatatcaaagccaaatgtcatctgatattctgattatcagctactttgatttctccatgtttttacttcatagagcaaggggtgtgcatttttacacatgccccattttaaaagaaaataagagaaatcagaattattgtgtttactcaaagtcacaatgatcacacatattcagtatcacttagagtcactggttatctttttctagcaccaaaagtaaatttctctcatttactgtcttgcaaagcatatagagattttgaggtcctgtgagatagtttcctatttaggcttctctgaattattgacatgaaccaaggtgggaccaaatgctatgaggatataaatattgagaaacgagattttatcagccaaccttgaactcagcttgaactctaaactaggaggctgttagctacatgttaacacatagtaagcaaacgatttcaagcacagtatctgtgtttgagagccagctaatttaaaaatgatctatgttgacaaagaagagggaggaaagtaaacatgagcaataaattggatggcttttcctcaaatggccttatcgaaaacaaatagttttcaagctcttttccagcaaaatcttagcacttttctgcataaaagccttcagtagatcttcatcaccttcagaagagagcccaacctctctaatggagtgaactatgcttgctctgacaatcttgtcttttgtaactcatggcccagcaaaaagaaggtagctgtaattccccaagtcggccacactcttaccctcctcatctcccttgcccagactactctttttctctctttgtcttatcctccccacagtcccctaactcaccccagcccaaacacacactctcccacctcaccccagtccccaacacaaagacacgtcttagccaggctaacttttacttagtaaaagttggtcaaatccatgtatgcatactccttcaggactcaggtcagccgtcatctcctgagatccttagctggtttccctgttgcccccggaagttttgtgcagatcactgtgtcactatgtttaaagtagggtctatttatatctttcttccccatcagatcatgagctgccgtaggacgggaattgagtggcattcatttttgggaaatcaattcttctctcccatgtgcatcttaggaacatgtcacaccctgagttagacaggacatattcagcaaaccactggactctagatgccacagcttttcttccttcctctctctcccttccctctctccacctcactgtgtgtgctgggagagggagtcaaactggggagccatctggggtttctctccagcccacccacactccctttttttgtctccacaaagaagtcctattctcattcccatctttttctttaaatcagctcacaaaggcagatcaggaagaatttgaatgtgcattaaaacagaatccaaataattagcaatagaaacacaattcccagggcggtgagcaagcagaatacaaatgcctaacctgcactcactctctgaaaaggaggagagatgcaggcattgcttgctggagttggttgctcttccaattagaactgacctaatgactccttctaagtaaaaaaaggaaacaaacaaaataaatcaaaaacaaaaaaacaaattggatgtttgtattaagacaggtcgaactttttgattctttgcatgtttatttttcagtgcttttgcaaaatatttgtggaacaaataataagtgaagttaaagttgttgacacaggtttccaaaaaggatttaatgagatggtagtcaaacctagctgctgataacaacaatacagccgaatcaccatctttcactccacaattattttatgagagtctattagtcatactgtgttatgtaaagaagcataacatgtggtcctttctgtcaagagacttggaaaccaggggcctaagggaaatgcacatgaatccaaagctaagcaaattgaagcatgtgaaacaagagttgtttaaaaggtagaactcaaatgtcaagtgagcgatacagatagtaatcattttgagacctgagaagggagtggtgctctgtgccaaggagttagtagacaaggcatggaggtaggaatgctcacagtctgttcttgggatgttggcttaaatggtctaattaggagggcttcggtttgaggaaatgaggttggaaaaacctgtggaggccgatttgaggataagaagttagttttcctctgttaggccactggttctcaaatttgactgccatctagaattactagagaaacttaaaaaatatgaatggatgcctgggtcctatacctagagattctgatttaattggccttggaaaaccaaaggcttttagatttttccaggtgattctaaatatgttgtcaggtgaattccactaggccatagtggctttcaacccaattgaatattagaatcaagtgggggaacttttaagataatatgaaagacaatccacagaatgagagaaaacatttacaaatcacatatctgataagaaacttgtatcaaggctgaggcaggcagatcatctgaggtcaggagtttgagaccagcctggcccacatggagaaaccccatctctactaaaaatataaaaattagctgggggtggtggtggtcacctccaattccagctactcgggaggctgaggcaggaggattgcttgattctgggtggcagaggctgcagtgagccaagatcatgccactgcactccagcctgggtgacagagtgagactctgtaaaaataaaaaaaaaaaagtataaaaaatgcatacagaactccaataattcaataataaaaagataaatagcctaaccagttaataaatgggcaaatgatctgaatagagagttctctaaaaagaatagaccaatggctaataagcacatgaaaagatgcttagcatcattagttattagagaaatagcaaatcaaaccatgatgagatatcacttcacgtccaccaggatggctataatagaaaagatgaacaataacaagtgtcggcaagggtgaggataaattggagccctcattcactgctggtgagaatgtacaatggtgcagttgctttggcaacagtttgacgattcctcaaaaagttaaacatagagttaccatatgacccagcaattttactgctggcaaatacctaagagagttgaaaacatacgtccacacaaaaatctgtatgcaaatgctcatagtagcattattcataatagccaaaaagtgatgaatagaaaaacaaaatgtagtatagccatacaatggaatattatttggccatgaagagtgaagttctggtgcatgcaacaacatggatgaaacttgaaacatggatgaaacttgaaaacattatgctaagtgaaagaaacgagacacaaaaagccacatattgtatgattctacttataaaaaaagtccagaataggcaaattcatagggccaaagtagatcagtggtttccagggatttaagggagggaggaagcagggtgatggtaaatgggtatggtatttctttatggagtaatgaaaatgttctggaatcagatagtggtgattcattcataactttgtgaatatactaaaaaatctctgaattttacactttaaaacagcaaactttatagtacctgaattatatctcaataaagttattatctaaaataaagaaaaaaaacttagtatcaatccttccccccagcctagaccaattaaatcagaatttccggaagtgggaggacttgggcacagatattttttcattttaaagttcttgatataaagccagcaatgattttttaaaaataattttgtagagatgggttctttctatgttgcccaggctggtcttgaactcctgggctcaagcattcatcccgccttggcctcccaaagtgctaggatcacaaaggtgtgagccatcatccccagccagcattattgattatataggagacaaaaagctactattaatttagttctatgccatttccttcttaccaaaaccaaaacaaaacacctgtgtatatgaattcaaattcagttaaattgtaaatttcatttaaaaatgaatctgattttatttggctcttcagtgtgggtatacgggatgttgcttcaaataaacttaaaagaaatgcaagtaggtaaataattattaacataccccaaaacaagagcaaaaaaatgcttttgtttgcattgaaatttgaatcaaagacacaaagtggtttgttgttttagaaaaattcttgagggccaggcgcagtggctcacacctgtaatcccagcactatgggaggccgaggcggtggatcacctgaggttgggagttcgagacaagcctgaccaacatggagaaaccccgtctctactaaaaatagaaaattagccgggcatggtggtgcatacctgttaatcccagctactcgggaggctgaggcaggagaatcacctgaacccagagggtggaggttgcagtcagctgagatcgcaccattgcactccagcctgggcaacaagagcgaaactctgtctccagaaaaaaaaaaaaaagaaaaattttggaaggtgtcttggttgcaaagttgattctcagtttctcagtgcttcagtggtctatttctcaggtggtcatagccaacttgggttttagttctggctttgctcaccatttgtttggtgacttcagacaaaccagctaatgtttctaggccttatacaatcattagaaaagaaaaaaaaaaagaaataatattgtcctgtgccaacaatgaggataccatgggaaatgagatcaatgtgttctcttcacttatggagttgataaactagtttcaggttctttgcttttaaagattgaactaaatgctctccagattctttgatcttttattgggatagcagtaaaggtagatgatggaccagagagataactcccctctggagtctttcacctttcatgatataagggaatagatctatgaatttcttggggaggctattctctgaatttggtgcagaaaacacattaaagcaaactcttgggttatattttttcttatctcttcatcccactcttgcaatgggcaataaacaaagtaaaaatgtttcaaaatattttaattcctttacaaaaacctgtatcacaacttaaaaacaaatctatttgtaggttgggcttggtggctcatgcttgtaatcccagcactttgggaggccaaggtggtcagatcacttgaggccaggagtttgagaccaggctagccaacatggtgaaaccccgtctatactaaaaaaatagaaaaattagctgggcgtggtggtgcatacctgtaatcccagctacttaagagactgaggcaggagaattgtttgaactcggtgggtggaggttgcagtgagctgagattgcaccactgcacttcagcctgggcaacagagcaagactctgtctcaaaaacaaacaaacaaagaaacagatctatttttgtgtctgtgtcaggcactaaagccacctccaaatatatcactcagtcaggaaattggcccaatgcatgattaatattaatgtctcaggaatatagatttaaaaattgtgagtgcctagctgtggtgctcaatgctaacagaaagccatgtactgccttctgggtgaaaacatgctccattgttccattcaaaagaggatgaaaataatattgaaatgttaacttttgaactctcagtataattatcccctgaagaggtcctacatcttctgccaagagaaaacctttgctggagatctgttcatttagttaattaatatattttgctctcaggaagaaaaattatccttatattcttgttctaagcaaatgatttttttttcccccaggaaacaagattttggtgaagcagtcgcccatgcttgtagcgtacgacaatgcggtcaaccttagctgcaagtattcctacaatctcttctcaagggagttccgggcatcccttcacaaaggactggatagtgctgtggaagtctgtgttgtatatgggaattactcccagcagcttcaggtttactcaaaaacggggttcaactgtgatgggaaattgggcaatgaatcagtgacattctacctccagaatttgtatgttaaccaaacagatatttacttctgcaaaattgaagttatgtatcctcctccttacctagacaatgagaagagcaatggaaccattatccatgtgaaaggtaacatacaactttaccagtgtaccaccctaaagtaatggttttcaaatgcagtcctgaaaactgggttgtggtcagtggtggggttgaataaggcctaagtgatttgatactaacaaagacaaataatgttttcagaaaaatttttccctttactgtagaggagattcaaggttatattttgaatatctttattttcctttgctgacattgagcgggagagtaagtgatgaagttaccgcatgtgggaacagatcatttttctccattccagtggatcatggcagaaaagaggttaccattaaaatataagcccaggtgccctcaagtaacagctgggtctaatgggttaagactcaggaagactcacttctatttctaattaattctttttttgtgctccataatcttcctctgtaaaagtacctttccattttctttttccttccttccttctttccttccttccttccttccttccttttcttttctttttctttttctttttttttgagacggactctcgctctgtcgcccaggctggagtgcagtggcgggatctcagttcactgcaagctctgcctcccgggttcacgtcattctcctgcctcagcctcccgatcagctgggactacaggtgcccgccaccacgcctggcttattttttgtatatttatttatttatttattttaattaattaattttttttttgagagggagtcttgctctgtcgcccaggctggaatgcggtggcgcgatctcggctcactgcaagctccgcctcccaggttcatgccattctcctgcctcagcctcctgagtagctgggactacaggtacctgccaccatgcccggctaattttttgtatttttagtagacagggtttcaccttgttagccaggatggtctcgatttcctgacctcgtgacccgcccgtgttggcctcccaaagtgctgggattacaggcgtgagccaccgcgcccagccattttttgtacttttagtagagacggggtttcaccgtgttagcaaggatggtctcaatctcctgacctcgtgatctgcccacctgggcctcccaaagtgctgtgattacaggcataagccaccgcgcccagcccgtacctttccattttctaaaatatacaaagaatgctggactagaaaccgggggacataaaatttgctattaatcaactgtgtgatcttggataagtcacctaactttttcatagtcaaaaactcagtacaactgttaagcagtatttgtgaattagtgaaaataagtctactgaacttttgttgatgttatgttctgcctaaatgttagggagaaaaatcatgattccccaactcagaagaatacagtattggtagcaacaagtaaagtttgattttttggtatactttgtggatatatcatagcttttcatttttgtggaatgataataagaaacacatatgttcagttttgtactgaatcctagcataatgccaatgaatggtttttcttcaatgctggaacagagccatgctgatgaaaaataggatactaaataaggaaagaattgttaatgtggcagataagcttttgtgttctggcaaaatagagacaattaatgtgtgaatattttgtttgctgagtcctatttagatttctaatatctgtaatatccaaacagaatattttaattgtatcaagtcaaaggttaaaaaattatgctattttgcttgtagctaagagtgaaatattttttcctatatgaaaggcatgctactttaggatagtattttatatatatgtatacacacatatacacatatcatttatgttagaactgagaaggacaccaatgatcctgtacttagtaattttcaatcctatctgtatattataaatctgagtaggttttaaaagaaataccaatgcctagttccagccctgagattctgatgtaattgatatgggttgaggaaggggtgctggacatcagtatattttcaaactttctcagataatttattgtgcagctaggatggaaaatcaatggactagaggatttttggtatgctttctagttctaattttctccaattttgaatagaattctataggttccttctcatccccttttgattcctaaagatataaagtgatttgtttgtcattatataatctatgagacagggttggaactagaaatttatcctctgattagcagtccagtgttctgactgccatattaggctgatgattttcttaaggcttgaaaacatgcatattatttaacttattccaaggatgcagtttagggtctagattaactatcttctgatgggagaaagggataaagttaggttaaggccattggaagtcaccgttttgaatcacacagtagaatccacaaagtcaagtgaatacaagtctaccagtgtaccatcctaacgtaatggctttcaactgtggtcgtgaaaactgaccagatcatggtcagtggtggggttgggtaagtctcaaagaggaaatctattcactctaagctggtgatatgtttaatatttttatttctttcacatttttctctgatgttcacaaggaaggaaatgcactcaattgctattcctgtatcatttaatccactctattttgtttttcagggaaacacctttgtccaagtcccctatttcccggaccttctaagcccttttgggtgctggtggtggttggtggagtcctggcttgctatagcttgctagtaacagtggcctttattattttctgggtaagagaagcagcactgcttttatgtaacttttccactgcacatgaaatctgaacacattcaagaattttgcctatgtggtttattttctgtttaatataggatgatgattttcttttccccatgcttgagtaggttctcttttagcttgttcaactctatctgagataaaaatctgatatgagttagatttcccagaaggcattgagtaggtggtgaggcaaaataagaagctaaatgggtaaattagggtggagggattaggagcagttgcctttcttctccccattttgcaatataattatgacacataaaacagttttaatgcgtatatatgtataaacacctaggcaacttgggaagctaggcaactgaagccaatggacaatgttggcttgatcaaaaatcatgagaaacttggctactgaaattgtgtattcaaacctagcaaagaaactagatctgtttatctgagtcatatttttttttctcctctgaagcagttgaattgtgtgaggccaagtatggtgctgtcattatgaaactataatgggagttagaattttctgagctctcaccactgaattgaagtactaacttttgcaaatgtttacgtaataaatgtggtgtatttttctttaccttcctcaacattgaatttttggcctgggtttgaacacattttgatgaacgcacctacagttaagaacgtacccctgagtgacccttgttcttactcagaaacttcttaggtacatagtatggtacagaatgtattgactccatgttgtctttgaatttttttctagaagttacatgcatggatgagtcatttcttcaatgagaaatgtattctcaaacataaaagactatttctcttgatagtctccaaaagactatttctcttgatattctccatttgatattaagtacatttggtgcttaatgaatgcttattggattgatgaattgataacctccagagaggtcaaattaaggatttaaatgagtctgcctgaagtatgatactcatctttaaggcataatctgtatatgtacctaattcatagatgggtcagtgatttctgaaagccatatcatgtgaagtcattctgtttactgtcagcttggtgactgcgggtacagacctggatccacagccatgccttcctattatccagtcttagattcttttagactcttcttggcctattgccaaagcttacctttcagttgttccccacatgctccttgcagttcagaagaccctagggctcagatggacatttgtcaggctgcctgttgcttactctgtacttgccgcagggtaggaaacaaagtggttgcttgttcctggaaattctttatactaggtatcatcttaagaatttgcctggcttgccttctgcaagttgcccaaccctgaaggtggggctttggtattgtaaaatgttgcctgaattctgcctctgatgttagttgactactttcacctttccagatcttggtatcttcatccaacttaccttctaactttgatcctctggtgtttgctgataattttcgagtttttagaattcttagttcttgtttcttcttaatctctggccattggcttttatgcctaccatatggcttttcaatcctcttattgggaatctcaactttctaacttaaaggccaggtgcagtggccctttggatacccctccaggaaaggcattcccctgtgatatgctgacctaggtcaaagtaatttactagctctgcagaaagtagttttgggaattactttaaccttcaatggccagaggacactgctcattattgaaaacttattataaatattcattagaatgtcagttactataatgagacatcaatttgttgagtgacttgagtcacccaaagggacaaaagcagcttctcactttcaatgaatttaaaccgttcactttcaactcagacacatcatagacacactgggtttttccttggcagtactactaattcctagtgagattcatcttgctttgttttaaaaaaattttatttttgttttactttgtcttacagaccccctgtgaattgggcagtcctgtcatttgtggcctcttgtagtcaattcggttacccaataaaaactaccacttatctgcatctcaaacctgggtctttgtactctcttaccaaaagagtataaatacaagtttgtctatatttcgtagaataacatagtatttttactctgggctcatcttttcctgctgttggtatttaagcaacaagtaccttgctgagttgggcatctaggccattatggatccctggagtttagctgtttcctgggtaattttctgagatcctatttttggctggtctgcagcgtgccttgatgtaagttgctgttttccggaacttcctgagggcctgatatgctactgtaggcagttctgggttgagtgggtttctaggctgagcgggtttctgggagcagctgcagattctatctcagttcttgacctgatgttgacatttgagtaaataaagagctccctttggtcaagctgtcacaggccagcacctgtcactgtctttcaattctccattcatgcagctgtgctggtaaagctgcccgttttcctaaagaaatctttttaaaaaacattatgttccccactgcagatcataatgtgaggaatgtagatagtgtgtgtacaggtagtgtctgctttttataataatccagtagattcttgaagaccacgtacttaagtagattaccttgcatatgccctgtgtattgctgctgttcccaggaaacaagtgggtaaggctggcatggggagaagggcaaaggaggaatggtccagaaattacatatcattagctgacattcactgttgaaggggtggagatgacacagacacatagggtaggtacttcctgcacacatatgcacacatactcaatgcacatgggtgctgtaggttctgcgtggtgtttgttcccagccatgcatctgtcattttcatcccactgctgtgtttagagttagggtgataataagtaagtctgccatctgacaatcacttgaggataagcatgggagctgactgcaacagacctttcattattttatgtgcaatgtaaagaacctgagaatcaagacacctttattgctgtggcctctctaccagctatgatttggtttgggtgtccggaggcagaggctgacacttggaggtttggcaaagggagtcctcagggttggagtaagtactaaaaatgcttcccaggttatcagctgttttctacactcatctggggacagacatttcctcggcctcacccctgccctgctgtgatcttgtgctcaagacagctctagtctttcatttacagaaaggatgtagaaccaaaacaattcttcattgcattgtaggatgtttagcagcatctctgacctctacccagtagatgccagtagcatccctccccgttgtgatgatccaaaatgtttttagacttcactaaatgtctcctgggacagggattaagggagcttgaggtgtcaaggatgaggttaggaggtctgtcttgggcagctgtatatatggtagtgtcattcactcagatgagaaacactggtaaaaaaaaaacagcatttgggggaaatcttgagttttattttagacatgttgagtttagagtggctttgaggtttagtccagagatataaatttgggtgagtaggtggtaattgaagctgtgaatgtggataagattgcctagggaaagaggatagagaagaaggcctaggaccaagcagtgagaaattctaacggctggttagagaaggatgagcttgcaaaggaggcagggaaggagtgacaagacaggtaggataaaaactgggatgtcatagatggcaaagagaaatagtatcacaaaaagaagagagttatcaatagtatagaatactgctgagagttgaagaagatgaggacttaaaacatgttagctgtgtttagtaacatggaagtcagcgtttttcaaacctttctttagcacttactcatgcccctttgacaaggaaggtgtgaagtgctcaggcaggagtgtatggaaacaaaaccagggctgaaatcattcacttatttattcattcaggtatcatgtcattcatgtacagcattatctacttaggtatcagcctgtgtgccaggaactaggcacttttttcataatagagaattctgaatccagaaatctgatggctttctgtttttagatgttttctgggtcatttgttaagaaatgtagaattttactatcacattgattcagaaatgatgttcctaacccttagtcaaaaattttgctaagattcatggtgggtgaaactattgcccttacttccctcacttctggtggaaattcatcctgatggagccaagcctatgaaagagagatgagtgtagaaatacatacccataaagacataggaatgtactagttgtctagaactgtaaattgccattagtttggactccacctttacaaatttgtgattattacagactctggaggagttgaaagtcctcttcggttaattatggaaaaacagcttgttaagcaaatgctaatgtaagaagatcacaatgtgggtaggcttaacctagtcaaaggaggaagggccttcaagtgtatttacatatcaacagtggatatgttaattagtgtgcatttttaattcaggtcagatgacagcattgagagtaacagggatgcatttctctaaaatactttctttgagatttttcaagttcaatgtgaagagtcagtagttgggtgtgattagtcattacccaagtccaaggtgctcaaaaaaggttagtgttttagtgtctctgtcatttgacagttaatattatgaatagttgtgcccacagtcttagaactccttccatgacattgtccctccatactgacacttctctttcctgcaggtgaggagtaagaggagcaggctcctgcacagtgactacatgaacatgactccccgccgccccgggcccacccgcaagcattaccagccctatgccccaccacgcgacttcgcagcctatcgctcctgacacggacgcctatccagaagccagccggctggcagcccccatctgctcaatatcactgctctggataggaaatgaccgccatctccagccggccacctcaggcccctgttgggccaccaatgccaatttttctcgagtgactagaccaaatatcaagatcattttgagactctgaaatgaagtaaaagagatttcctgtgacaggccaagtcttacagtgccatggcccacattccaacttaccatgtacttagtgacttgactgagaagttagggtagaaaacaaaaagggagtggattctgggagcctcttccctttctcactcacctgcacatctcagtcaagcaaagtgtggtatccacagacattttagttgcagaagaaaggctaggaaatcattccttttggttaaatgggtgtttaatcttttggttagtgggttaaacggggtaagttagagtagggggagggataggaagacatatttaaaaaccattaaaacactgtctcccactcatgaaatgagccacgtagttcctatttaatgctgttttcctttagtttagaaatacatagacattgtcttttatgaattctgatcatatttagtcattttgaccaaatgagggatttggtcaaatgagggattccctcaaagcaatatcaggtaaaccaagttgctttcctcactccctgtcatgagacttcagtgttaatgttcacaatatactttcgaaagaataaaatagttctcctacatgaagaaagaatatgtcaggaaataaggtcactttatgtcaaaattatttgagtactatgggacctggcgcagtggctcatgcttgtaatcccagcactttgggaggccgaggtgggcagatcacttgagatcaggaccagcctggtcaagatggtgaaactccgtctgtactaaaaatacaaaatttagcttggcctggtggcaggcacctgtaatcccagctgcccaggaggctgaggcatgagaatcgcttgaacctggcaggcggaggttgcagtgagccgagatagtgccacagctctccagcctgggcgacagagtgagactccatctcaaacaacaacaacaacaacaacaacaacaacaaaccacaaaattatttgagtactgtgaaggattatttgtctaacagttcattccaatcagaccaggtaggagctttcctgtttcatatgtttcagggttgcacagttggtctctttaatgtcggtgtggagatccaaagtgggttgtggaaagagcgtccataggagaagtgagaatactgtgaaaaagggatgttagcattcattagagtatgaggatgagtcccaagaaggttctttggaaggaggacgaatagaatggagtaatgaaattcttgccatgtgctgaggagatagccagcattaggtgacaatcttccagaagtggtcaggcagaaggtgccctggtgagagctcctttacagggactttatgtggtttagggctcagagctccaaaactctgggctcagctgctcctgtaccttggaggtccattcacatgggaaagtattttggaatgtgtcttttgaagagagcatcagagttcttaagggactgggtaaggcctgaccctgaaatgaccatggatatttttctacctacagtttgagtcaactagaatatgcctggggaccttgaagaatggcccttcagtggccctcaccatttgttcatgcttcagttaattcaggtgttgaaggagcttaggttttagaggcacgtagacttggttcaagtctcgttagtagttgaatagcctcaggcaagtcactgcccacctaagatgatggttcttcaactataaaatggagataatggttacaaatgtctcttcctatagtataatctccataagggcatggcccaagtctgtctttgactctgcctatccctgacatttagtagcatgcccgacatacaatgttagctattggtattattgccatatagataaattatgtataaaaattaaactgggcaatagcctaagaaggggggaatattgtaacacaaatttaaacccactacgcagggatgaggtgctataatatgaggaccttttaacttccatcattttcctgtttcttgaaatagtttatcttgtaatgaaatataaggcacctcccacttttatgtatagaaagaggtcttttaatttttttttaatgtgagaaggaagggaggagtaggaatcttgagattccagatcgaaaatactgtactttggttgatttttaagtgggcttccattccatggatttaatcagtcccaagaagatcaaactcagcagtacttgggtgctgaagaactgttggatttaccctggcacgtgtgccacttgccagcttcttgggcacacagagttcttcaatccaagttatcagattgtatttgaaaatgacagagctggagagttttttgaaatggcagtggcaaataaataaatacttttttttaaatggaaagacttgatctatggtaataaatgattttgttttctgactggaaaaataggcctactaaagatgaatcacacttgagatgtttcttactcactctgcacagaaacaaagaagaaatgttatacagggaagtccgttttcactattagtatgaaccaagaaatggttcaaaaacagtggtaggagcaatgctttcatagtttcagatatggtagttatgaagaaaacaatgtcatttgctgctattattgtaagagtcttataattaatggtactcctataatttttgattgtgagctcacctatttgggttaagcatgccaatttaaagagaccaagtgtatgtacattatgttctacatattcagtgataaaattactaaactactatatgtctgctttaaatttgtactttaatattgtcttttggtattaagaaagatatgctttcagaatagatatgcttcgctttggcaaggaatttggatagaacttgctatttaaaagaggtgtggggtaaatccttgtataaatctccagtttagccttttttgaaaaagctagactttcaaatactaatttcacttcaagcagggtacgtttctggtttgtttgcttgacttcagtcacaatttcttatcagaccaatggctgacctctttgagatgtcaggctaggcttacctatgtgttctgtgtcatgtgaatgctgagaagtttgacagagatccaacttcagccttgaccccatcagtccctcgggttaactaactgagccaccggtcctcatggctattttaatgagggtattgatggttaaatgcatgtctgatcccttatcccagccatttgcactgccagctgggaactataccagacctggatactgatcccaaagtgttaaattcaactacatgctggagattagagatggtgccaataaaggacccagaaccaggatcttgattgctatagacttattaataatccaggtcaaagagagtgacacacactctctcaagacctggggtgagggagtctgtgttatctgcaaggccatttgaggctcagaaagtctctctttcctatagatatatgcatactttctgacatataggaatgtatcaggaatactcaaccatcacaggcatgttcctacctcagggcctttacatgtcctgtttactctgtctagaatgtccttctgtagatgacctggcttgcctcgtcacccttcaggtccttgctcaagtgtcatcttctcccctagttaaactaccccacaccctgtctgctttccttgcttatttttctccatagcattttaccatctcttacattagacatttttcttatttatttgtagtttataagcttcatgaggcaagtaactttgctttgtttcttgctgtatctccagtgcccagagcagtgcctggtatataataaatatttattgactgagtgaatgagttttacatggccttatgaattaacggtgagtctaaatgttataatcatactttgagagggagaaagccagttctattttctactttcctcttaagaagttcaaaaattcattttattaaaaaaacaggaggtaaaatatatacacagccaaatctagtgaaagaaaatctgatgaatataagttcatttacgttttagaaatttttgtgcagtgaggaaaaccagtactgttagaaaagtcatgccaactcagccactgtcaggagtaagttgattttccattgaagtccccaaattccctcttaatggagtattggctatatcttaaacatatctttagtttaagacttctgaaaatgttgtctttgtctaaaatgttaaaatcccatcctactactgacctgctactcttttttctggggtgattttacccccaacaaattctataaatgccttctctggctctgattcaaaaagtgctcacaaatggaaatgctggggacagaaaatttcaacttcttcacctgtcatactcatatcatagctgaacactctaatagcacacacacacacacacacacacacacacagacacacacacacacacacacacccctatcatcttctgggtaggggaagggaaaggcgcttgaacaacagacacaagagctggtctaataattcatgtagcaccttctgtttccttcgttgaaattttactctgaaggtgactcagagtcaattaaattggtgtgcaatgagttcatctctaaactgattcttttctttggtgaaatgaagcttattaaacttaataaaggtaattaaacttgaaaaagatgagcttatatgtctcttactactccaagaaagactgaactcagctggttactcatggatagttcaataagacaaatcaaatcaattggaaaggaacgagatgggtaaaaaaaaaaaagccgttaaatgaatctgctcaataagcactcctttaccatgctaataaaaataatgtaacccagttctgtaaaaaggttctagtactttgaaactcaagttcaaaacaaaataaaatgcaaacttcgcttcacctaacacctcccacaacattctagctacccaactgggtgaatattgtaattgcccacaaccccgaattcactttttccctccagtatgataaaacagattgattcccttttaaagcaataccctttcttctctcccatcttgtcggtatcagagataatggataggtgagaaaaaattaaagaagcttctggattcattgtaatggggacctaaccatcacactatgcagcagcaaatgggatggtctggaaagcagaccagaaccttgtctggtaactttgcttctaatgtctgtctgtgtttcctaaactgaggcctaactcttgactttttgacagtggtgctcataagaaagtttggggctgggcacggtcactcatgcctgtaatgtcagcactttgggaggctaatgcaggaggatcacttgagtctaggagttcaagaccagcttgaacaacatagggagaccctgtctgtattaaaaaaaaaaattagccagacgtgatggtgcaggcctgtagtcccagctacttaggaggctgaggctgcagtgatctgggatcataccccttcaagaacacatgtgaatggtggggcctctcagctttctctgatttggcaacccagaagaaatatgtgctttctctttgaagattcacaggatcctagcacttggaaacctaggccactgtccagagcagaaggtcacacaatttctcagtgtgacttttgttcatttcagggtgttgacactgggcccaacacttgaaaattgcttgagatgataaattgcttgaggtgatcaaagaatatatcagctcttcaaagctgacctcattcttggtgcaactctcagggccagaatgtgtgcttcccgaagctcattttcctatctgatttgcctgttgaaactctgtgaaagacccttgaatgctaggaatttgaagggacaaaaagttgaagaaaggtgaatggatttcagggtggaagtggactggattttactctcacttcatcaggcagagctatctcagtgataaattgaaactctcctctggctccaaagaacaaatcatgagctgggtggaaatgtcagttgagaagaagagcagcaaacagctttgttttcctatagttgtggttttacatggtgatgatgacacacgaagatgaaaatgtgcagcatgaactccagttgttatctgagtgagcatctctgccaacactgaaggatatgtgtgggtgtcacctgaaaacaaagagaaagacagagagagaaaaagaagaaaaggaggccctgtttcggaaagaagagccagttaatcaaagatcagcagtgacaagtggcgctgtttatttcatgagctttatatgtgatttccttccccttgctaatctcgtctgaatttattctctggactaaatatatttgcatctggtgactgaggaaggggtggaaaaggtgaccttgaatgggcatcagggtagttaccatagttatttagtcatttcttcagtctcttgggcacacacttagcttcccaaatggaggtttctgctaacttttgagaacctgtgacatattacacagggaagacaaacttcaggtggttgttggggaccctcttttatccccaaccctatgcaatgcttgtttcatttgctttatgtttctccttcctctcttctacttcattcattctagaactagttaatgggcacctgcccagcactaagatgtgggctaggtacagggatgtggcagtgtgcagcacagatattacctccacacttccgaagtgtagagtgtctgctttgtatattacttcagttttttttttcttttcctgccccctatatcctgcttctaggggtaaccacttagtcttgattttggggcttagatcttaatgtggctacttgatagcctttgttggtttgcctgaaattcatttctttgacatgttcctatttaacatctctaactctttcaatgtcatagatcaggaatcagcaaatttttttctgttaagggccagatagtaaatattttaggctttgtgactatactgtctcttatagataataagttttgccactgtagtgtgaaagcagccataaacaatatataaacaaataagcatggctgcattccaataaacctttatttatggatattgatatgtgaagttcgtgtgattttcatgtcatgcaatattacttttcctttgtttttttcccccaaccatttatagatggaaaatccatttttagttcatgggctgtacaaaggcaggtagtgggctggacatggcttatgggctacggtttgctgatccttgacttagatctaagctgcaaccttagctataggcttatttttgagttccagccaccttctacatttttagggccagaaggaattggtttgaatgtgtgtaaaggcttcttgggagtgctgagagtcaagcatctcttttgaaagaaggacatggatcaataaagaagaaggaagagctttcatctaaggaaagccatttgaggtagaagaaatgggaagttataagcaaagggaatgagaagctgtttcaggaagacagagtcttctgtatattattattattaattttgacagagtcttgctctgtcacccaggctggagtacagtagcatgatctcagctcactacatcctctgcctctcggggtcaagcgattctcatgcctcagtctcctcagtagctgggatgataggcacacgccaccactcccggctaatttttttattttttatttttatttttagtagagatggggtttcaccatgttggccaggctggtctcgaacgcctggcctcaagtgatccacccaccacggcctcccaaagtgttgggattacaggcatgagccactgtgcctggcctatattattgatgaaagcctaaacatcttgggagctcttgttactcttttctcaagtcctttctactcttttccctcttttctaggcatcacatccttgtaatctccaaggaaacaaatttctttctttcttttttttttttttgagatggagtctcgatctatcgcccaggctggagtgcagtggcactatctccgctcactgcaagctctgcctcctggttcatgccattctcctgcctcagcctcccgagtagatgggactacaggcatccgccacccaccaccacgcctggctaattttttgtatttttagtagagacagggtttcaccatgttagccaggatggtctcgatctcctgacctcgtgatccgcccaccttggcctcccaaagtgctgggattataggcatgagccaccgcgcccggccaggaaacaaatgcacagaaggaagggggcagaaaatggtctgtgtccaatgtgatgaacaggcttgacttccctgctaattcttccctaagtagtacatccaaatccaactctgggtgggtagagatcagaagcagctgtctcagaattggcctcctactttctacctatctcatgtttccagtctgcatttggctgccatttatgagtggccaagagtaacccctcatgaatctacattaaggctcagcatttcacaagtagctgatgaaatcagtattactcagatcagaaaggcaccgacctaacccttaccatcccttgcccccattcctcactccagtcttgttatacccaaggtacaaatcgttcctggaagcagcccagcatatgggggcaccctaagccacacacccagtcacaccatctgggcaatttaaaaatagggccaaatggagcatttagactggtctgtccagccaagatcaggaaattgcctctaaaaggtcagatgattaagattattgtaccaacagtctaggatgtcagtaatgaaaaaaagcttctggcagaatgaattttcctgactttacacatggtgttccagttctgagttggggtgaacagctttgggaaatcccaagatttttctactccagaaaatagtgctactatgtacatttatgcactgtgtgccttgcacaaaggcccctagtgaagggaatgaagagggctgaaatctagtcaagctccccttatcaagctctgcacctgcttaatgaaggagagggcgccttctctaatgcccgcatgtatgggctattgaggccctgatagaatgctagcctttctgccatttggttactgagctttatagaaattatatccccattctcaaagcaggaattttctaggatgagtaatagttaaaacaaaataaaactacccctcccccacaaaatggaatggttctaaatatcacaaaaatttatctcctcggtcccttctttagtcttcccttcaccttagctctgcatgttttaatttagttggttggtttttcttgacttacactgggtgggtatgtctttggagagtaatgagagaagaaacttcctagttcgtgtcctagtttggctcttagaagaaaaacaaaaaatgtttttgtgacctgaggaatactaggtaatatagcttggatatttgtcctctccaaatctcattttgaaatttgatccccagtgttggagatggggtctagtgggaggtgtttgggtcttaggggcggatccctcatgaatggcttggtgccattcgtatgggattgagttcttgctcttagttttggggagatctggttgtcaaaaagagtctggcatcctattcagtgcctcccttctcccctgcctatttctctctctttctcactctttctctctctctatctctcacttcctgccatgtgatctttacataccagctccccttcccccttctgccatgactggaagcttcctgaagtccctgctagaagcagaatagagtgctatacttcttgtacagcctgcagaactatgttccaaataaacctctttttgttataaattacccagcctcaggtattcctttatagcaatgcaaatggactaagacactgggtttggggttagttttggggatgtacctagaactcttcagttaatgtagtctactcttatttcttagttatcagtacatgaggggaccagactaaataacctcagagctcattcctataattgttttcatactccatattataactctcctagaattatcttcccatcatgaataccattgttttgggtttctccactatcacatttctaagtcttacagatataaatattttatgtttgagatttgtcaaccaggattgtttgaataaatgtataattctctacaactgttaagtttactaatttatcaaaattgtttccatcactttttctggagaaaataatgaattctaaagtttagtttaaagttaaaataatgaattttaaagtttaatgaagtttaaggtttaaaaaatgatgtaatagtttactatgtaaatactatgtaaactattacatcattttttaaagcttgtcattttccaaataaacttcttatacattattgaagtcttcatagtgaactacatcttgcatgtgatgggtgctcagaatatcttaatgagtgaatcaatggatggatggataaatgaatgactatctttcatttgataaatatccgcaagctattttggtttttgacaaattagatgaaacaggtattatgaaaagacttgggaaaattgaggacaaattagttaactagatactatgaaaagacttgggaaattcatatttttaaaattattgaaatgtattaattaatatgcattttaagacattgtttaggcattcagaagcaaaaactgtttatccttccttggcaacaaacagaactctaattgtgttcagttatctactctccatgtgctctggggagttccagggagtggataaggattagtttaagccagaatggtagtcctaaccttctcatcagtgattggtttaggcatggacacatgataaaattctgaccaatagcctgacgggtctctgataaagtttctttttgctcttttttttattttgagacagtctcactctgttgcccaggctggagtgcagtggtgccatcttggctaactgcaacctcactgcaacctccagcttcctgggttcaagcaattcttgtgcctcagtctcctgagtagctgggactacaggcatgtaccaccatgcctggctaatttttgtatttttagtagagacaggatttcaccatgttcgccaggctggtcccgaactcctgacctcaagtgatctacttgcctcggcctccaaagtgctgggattacaggtgtgagccaccgtgctcagcctctccttgctctttaaaaagagatgtttggaaacaaagtttcctttctgctatagaatgttatgtctgcaagcagcatctgatatagcctctttgcgaccaggggaggaattggcctgagaacatgctaaggcaggaagagcagaaagaggggaggaacctggatcttggtgacattattgagctgcagattgagccgacttgaattctccttgcttccttccttccttccttccttccttccttcctcccttccttccttccagttcttgtcatgtgagacagtaaataactttattgtttaagcccttttgggttagattttctattacatgaagtttaaagcattctgataacttcatgtttattgatgtgtataaatactaatatattctattatttgggggatacaaagaatttgactcaatagtatcttgttctattgacatgttcaattattaatcactgataaccctgaataactaaatgttattaccacatttaggacaatatccacgtccactgacatatgaaatttgggcaatttgcttctttgggaagcattataaatcacagaacagcagaggatacaaagacccccacaagagatcatcaagattttcttcttcccttctttttgtcatacacattgctgagaaggagcacctccaggaaggaaccaaattatttgtatttttctgttatttttagttttgagacccggtctcactctgtcacccaggccagagtgcagtggtacagtggctcactgcaacctctgcctcccaggttcaagcaattctcctgcatcagcctcccaagtagctgggattacaggtgcccaccagcacgcccagctaatttttgtatgttttcagtagagatggggtttcatcatgtggccgggctggtctcgaactcctgacctcaagtgatctgcccgcctcagccttccaaagtgctgagtttacaggcatgagccaccaagtccagccagtatttgtattttgaattaaagtatgtatgtgaaaaatgagaacactggctcacttcctggtaatataaaatacaacatatcagtaaaatcttccatgattctcctagttcagtgatctctttctacccctgtgttacctaatgctggcctaaactccagcggcctgtagaggagattggtttttgtagttgtaaaataatattttaggctgggtgtggtgcctcatgcctgtaatcccagtactttgggaggctgaggcgggcagatcacgaggtcaggagatggaggccaacatggtgaaaccctgtctctactaaaaatacaaaaattagctgggcgtgatggtgcgtgcctgtaatcccagctacttgggaggctgaggcaggagaatcgcttgaacctgggaggcggaggttgcagtgagccgagatggcgccactgcactccagcctgggcaacagagcgagactctgtctcaaaaaaaaaaaagtcacgt

SEQ ID NO: 257 - DNA, 3804 bp, Homo sapiens
taaagtcatcaaaacaacgttatatcctgtgtgaaatgctgcagtcaggatgccttgtggtttgagtgccttgatcatgtgccctaaggggatggtggcggtggtggtggccgtggatgacggagactctcaggccttggcaggtgcgtctttcagttcccctcacacttcgggttcctcggggaggaggggctggaaccctagcccatcgtcaggacaaagatgctcaggctgctcttggctctcaacttattcccttcaattcaagtaacaggaaacaagattttggtgaagcagtcgcccatgcttgtagcgtacgacaatgcggtcaaccttagctgcaagtattcctacaatctcttctcaagggagttccgggcatcccttcacaaaggactggatagtgctgtggaagtctgtgttgtatatgggaattactcccagcagcttcaggtttactcaaaaacggggttcaactgtgatgggaaattgggcaatgaatcagtgacattctacctccagaatttgtatgttaaccaaacagatatttacttctgcaaaattgaagttatgtatcctcctccttacctagacaatgagaagagcaatggaaccattatccatgtgaaagggaaacacctttgtccaagtcccctatttcccggaccttctaagcccttttgggtgctggtggtggttggtggagtcctggcttgctatagcttgctagtaacagtggcctttattattttctgggtgaggagtaagaggagcaggctcctgcacagtgactacatgaacatgactccccgccgccccgggcccacccgcaagcattaccagccctatgccccaccacgcgacttcgcagcctatcgctcctgacacggacgcctatccagaagccagccggctggcagcccccatctgctcaatatcactgctctggataggaaatgaccgccatctccagccggccacctcaggcccctgttgggccaccaatgccaatttttctcgagtgactagaccaaatatcaagatcattttgagactctgaaatgaagtaaaagagatttcctgtgacaggccaagtcttacagtgccatggcccacattccaacttaccatgtacttagtgacttgactgagaagttagggtagaaaacaaaaagggagtggattctgggagcctcttccctttctcactcacctgcacatctcagtcaagcaaagtgtggtatccacagacattttagttgcagaagaaaggctaggaaatcattccttttggttaaatgggtgtttaatcttttggttagtgggttaaacggggtaagttagagtagggggagggataggaagacatatttaaaaaccattaaaacactgtctcccactcatgaaatgagccacgtagttcctatttaatgctgttttcctttagtttagaaatacatagacattgtcttttatgaattctgatcatatttagtcattttgaccaaatgagggatttggtcaaatgagggattccctcaaagcaatatcaggtaaaccaagttgctttcctcactccctgtcatgagacttcagtgttaatgttcacaatatactttcgaaagaataaaatagttctcctacatgaagaaagaatatgtcaggaaataaggtcactttatgtcaaaattatttgagtactatgggacctggcgcagtggctcatgcttgtaatcccagcactttgggaggccgaggtgggcagatcacttgagatcaggaccagcctggtcaagatggtgaaactccgtctgtactaaaaatacaaaatttagcttggcctggtggcaggcacctgtaatcccagctgcccaggaggctgaggcatgagaatcgcttgaacctggcaggcggaggttgcagtgagccgagatagtgccacagctctccagcctgggcgacagagtgagactccatctcaaacaacaacaacaacaacaacaacaacaacaaaccacaaaattatttgagtactgtgaaggattatttgtctaacagttcattccaatcagaccaggtaggagctttcctgtttcatatgtttcagggttgcacagttggtctctttaatgtcggtgtggagatccaaagtgggttgtggaaagagcgtccataggagaagtgagaatactgtgaaaagggatgttagcattcattagagtatgaggatgagtcccaagaaggttctttggaaggaggacgaatagaatggagtaatgaaattcttgccatgtgctgaggagatagccagcattaggtgacaatcttccagaagtggtcaggcagaaggtgccctggtgagagctcctttacagggactttatgtggtttagggctcagagctccaaaactctgggctcagctgctcctgtaccttggaggtccattcacatgggaaagtattttggaatgtgtcttttgaagagagcatcagagttcttaagggactgggtaaggcctgaccctgaaatgaccatggatatttttctacctacagtttgagtcaactagaatatgcctggggaccttgaagaatgcccttcagtggccctcaccatttgttcatgcttcagttaattcaggtgttgaaggagcttaggttttagaggcacgtagacttggttcaagtctcgttagtagttgaatagcctcaggcaagtcactgcccacctaagatgatggttcttcaactataaatggagataatggttacaaatgtctcttcctatagtataatctccataagggcatggcccaagtctgtctttgactctgcctatccctgacgtttagtagcatgcccgacatacaatgttagctattggtattattgccatatagataaattatgtataaaaattaaactgggcaatagcctaagaaggggggaatattgtaacacaaatttaaacccactacgcagggatgaggtgctataatatgaggaccttttaacttccatcattttcctgtttcttgaaatagtttatcttgtaatgaaatataaggcacctcccacttttatgtatagaaagaggtcttttaatttttttttaatgtgagaaggaagggaggagtaggaatcttgagattccatatcgaaaatactgtactttggttgatttttaagtgggcttccattccatggatttaatcagtcccaagaagatcaaactcagcagtacttgggtgctgaagaactgttggatttaccctggcacgtgtgccacttgcccagcttcttgggcacacagagttcttcaatccaagttatcagattgtatttgaaaatgacagagctggagagttttttgaaatggcagtggcaaataaataaatacttttttttaaatggaaagacttgatctatggtaataaatgattttgttttctgactggaaaaataggcctactaaagatgaatcacacttgagatgtttcttactcactctgcacagaaacaaagaagaaatgttatacagggaagtccgttttcactattagtatgaaccaagaaatggttcaaaaacagtggtaggagcaatgctttcatagtttcagatatggtagttatgaagaaaacaatgtcatttgctgctattattgtaagagtcttataattaatggtactcctataatttttgattgtgagctcacctatttgggttaagcatgccaatttaaagagaccaagtgtatgtacattatgttctacatattcagtgataaaattactaaactact

SEQ ID NO: 258 - DNA, 663 bp, Homo sapiens
atgctcaggctgctcttggctctcaacttattcccttcaattcaagtaacaggaaacaagattttggtgaagcagtcgcccatgcttgtagcgtacgacaatgcggtcaaccttagctgcaagtattcctacaatctcttctcaagggagttccgggcatcccttcacaaaggactggatagtgctgtggaagtctgtgttgtatatgggaattactcccagcagcttcaggtttactcaaaaacggggttcaactgtgatgggaaattgggcaatgaatcagtgacattctacctccagaatttgtatgttaaccaaacagatatttacttctgcaaaattgaagttatgtatcctcctccttacctagacaatgagaagagcaatggaaccattatccatgtgaaagggaaacacctttgtccaagtcccctatttcccggaccttctaagcccttttgggtgctggtggtggttggtggagtcctggcttgctatagcttgctagtaacagtggcctttattattttctgggtgaggagtaagaggagcaggctcctgcacagtgactacatgaacatgactccccgccgccccgggcccacccgcaagcattaccagccctatgccccaccacgcgacttcgcagcctatcgctcctga

SEQ ID NO: 259 - DNA, 50295 bp, Mus musculus
  misc_feature (15336)..(15740): "n" at positions 15336 through 15740 can be any base.
  misc_feature (47723)..(47935): "n" at positions 47723 through 47935 can be any base.
gctacttaagagggccctgcttaggtgtctttccgagagccatgtgtctggtttttctgaggaagacaagtctactgagaactgaagtcgggtcctactgtggtttcacagggttagagctgataaaacaaaaccctgggttacagcccagtaactcagtactacccggtactcagtactacccggtactcagtactacccggtactcaggggttaagatcgtttttattgaaagtgaagttcatagtcttgtttgtgagattcccagaaatgtggggttcacttctgggaacagagtctagccatactcaaagggtgtacacgctcaggcccgaagctcggctcattgctaattctgcattcttattcaaaaatatctctctataaaaggaatgtggtttccttgttaaaaccgtcaatgcaatggtgttaatttcccagaaattttggaccggagacttcagactccagagggagggctccctctccttccaatgtctcttcaaccgtgtggctttttatactgcctgtcctatcccaggacctcctggctggggagcccacagcatctgctcactgtatggagagcagggctgtaactgcccaccagtagggtgctcaggtgttcatgggatacgccctgcatacatatgggtgccttaccaggtgtccaagagagatggtgaggtttgagagccactctgagacaaaggacagatagagatggtcacagatctggactggctccagatgccatgcacaccccccacgaggcagcatgagggtgtgagacaccacacctcatcttagagatcacagggattggagcccaggcaggcaaactcaggtctgtggtccaaccctgacatatcttttggaatcagagtcacccatggccttgctccagagtctggggagtgagactaaaccgtactactccaggggggatgctgttgtgtagaaggcagccctaagaagaggaccctgggagatccatcccccccggcccaatgctactcgagggtccttcacaatggggctggagaggtgtcccagctttgcagtgtgagaaaggccaggccaaaggaaaaggaaggaccaagaatcaggaaggacaggtagaaagtgctagaaaacagattcaacccagaacctgcagttaggaacctgtggacaccctgacctagttcagcttctgacctctggctcagagagatgacaagctggtgtccgtccattagtcaccaaacacacagccaggaaggtgaccggattctggaaagcctggaggaattctctggtgtgactgcagctctggaactttctagatgcttctagattactaccagctcaggctggaagacagtttcccttcccacctctggtgggaaagaaactgggaacaaaacttctagttccccttttcacaggtggagaggcccacctgtttccattcttgacttgggtgttcttctcaggcttgcagttatacagatagggtcatgaaaaggtcacaggcccgagttctcactccttatctgaaatgctcttctccctggcagcaaaaagccctcaggatgtcagtcagtgtggacagacccgagacccgcttgctgcgtgtcattgtccacaccccccatcctcactccacccgacccccagtctccctctctgagccccacctgtggaattctgctggctcctgtggctgaagatgctgggcctgtgacaggaggtgcccgtggtccattcctcccttctcggagagctcgctcttgcaaagctgggacaccagtggccgtgagatcgcgtctctctgagttgagcggggagtggatggaccagctccatgcagcccagccactgtgatcatcttgtcctggactggacatgccaaggggcactctgacacttgccaccgccatgtctctagcccttcctcctccctgataccctggagggacttccccgggacttgcaaagcctttgccccttcaagtcccttgcttatgaggtctagatttgaaaactcttgttgcctcaagtcaccatcttgtgccatcttgactctatcagctgtacatggtacaagtgtgtatgtgccagcgcacttgagtggaagccagagagaggggggtgctctgtcactctacccttgaggcagggtccctcactgggcctggagcaaggctggcagccagggagccccacgatctccccatctctgcttcccacagcactggggttctaggtgcccgtgtgacttttatgctggttctgggagtcaaactcaggtcctcttgtttctgtaacaagtgttctcacctgccgaaccatcttcccagcctgtcgtcttgacttctgtgttagggcttgcgtctgtgaggcacccaggtctccagcctttgtacacagggttgaaattctcagtggggacaatgttaatgcttttgcacgtgacatcaccatttcaagcccagacacacatagctggcaggcagaagtttctacttactcctgtcttgtaacagggaacattggtctgtgcaggctcactgccacacccttcttcctagctgcctatgaccacgccctccaccctccaccctcctccccatcccaggaggcggctgttcatggatcctccactaagccagtctgcccatggcatcttgccattctcccctaatgtccgccttcctccctagcagatgagaaaccccctcttagagagtttcgcgctcgcccagttgggactctcacactcctctgtaactcataaacagggttggtagccccgggccaggcacattttccacagaggatacagaggttacccaagggggaggtggcgagtgtcccagctctgaatgataccctcctagggtctcattgctctcagccgagcgtagcgcagccctgagaagagagagagtgtgtgtgtgtgtgtgtgtgtgtgtgtgtgtgtgtgtatccacatttggtcctaagccagcagttctcagtcccagccacacatccaggaagtctcctggatgacaggggtcctgccctctgttgatggggggtcccatcccctgtaggtattacatgggcagtgctgtgtggtttagagtgagactttactgagtccatttttagagcccaaagggacagctctcccttcctgctccccactctcatcacccaggcctggggtgcctttgaacacactgaaacaggtagtttgccttaaaaaccagcacctggccgggcggtggtggcgcaagcctttaatcccagcacttgggaggcagaggcaggcggatttctgagttcaaggccagcctggtctacaaagtgagttccaggacagccagggctacacagagaaaccctgtctcgaaaaaaacaaaccaaaccaaaccaaaacaaaacaaaaaaacaaacccagcacctgagcacctcaggtatgtagattctgtcctggctgcagggtgggaaggcgaggccctgtcctgcctggtgtccccaatctgccacccttctctctacaccgaggagcccacagggctagacacctggatgcttttagcctcgtctgagcagtggaaatttgtgggcctggtgggggtttggctgcatttggtcggggtgaggtgaagggcctgaaggatggggtggcagcgtgctagagttgatctacaaggtagggtggcaatcacactgaggtaagacagttggctgcagactccagggtcacacctcaagttaagatagcatacagtgtcacagaagacacgaggcttacgaaggctgacacgggttttgtgagtttgagacaaggtcttgctgtgtagctcaggctagtttcagaactcaatcctcctgcctcagctggaatcacagatgtgcaacaccatgccctgcttaatgttagcttttcgagaaggaaaaaggcccgcagttgggtgctgctctctgactggggtaggggtggggcttctcagaaagaaggaaatgggcccatgctgcctagggccacagacttgctctgaactcagttacctaggaaaccaagagggggcagggcttgctgagttagcggccaggcctccaggcctcggagagacccaggctgggggtggaggagtttcacctgtggtagtgaatgaacggggagagtgctccctggaggtggcgatgtctgggagaccatggaggccaactgaggaatagggttcttaggaaacagtgctggctgaggttggatgtgccagggtgcaggggtactcagacccaaggaggagatctactgtagtactggaagttgttgggggggggggggaaggagggagacaggaagtagacaccaccgaggaatcgaggaatggttggttatagggccaccagctgcatggggcgtggcaggaaggggctgctgtaaaattgcaaaagctaagcattagggctggggggacagggccctggaatctgaagaggaaggtcccaggactgaggggtgcaggcagggcctgagcagtaggacctagtatctcaggcatgtgggttctccaggaagaacatggcctgtagagggaggaggggtgtggcctcagagaacccactggagagatggatcaaagctgggcaggggttggaaccagaaacacggaagaggcagaagggaggggagatcacgcccggaagccaaaatgagatgtgaaagggaaagagatcccaggatggtcccgcaagggctgcctcaggctgggtgtgactggagatgagccagtggggaacctcccagagtgagtcctggtgatacatggtgggcagaagccagatggccagccaagaagtgagtgggtgctggaaagaggggaacatgagtgggccaaggggctgggctattgagagtggacagttgggggaggcagggggtcagagagcctgcaactctgctctggagattgggctggcatcagttcacctgggcccagacaggacctgaacacccagaatccattgcaagccactgttttcagtggtaagatgctctctaggggcctctcccccctccctccctccctccctccttaatcctgcttctggccttccctcaaggccatttggcagtgtctccccacctcggggacgtgtagccttgaaggtacatgtataggaccccaggacacccatacttgccacacagcaacacttgcaagtaccagccctgcctcttctccagcgctagaccctcagaggggtggacggggggaggggtggtgttgttcttggcattcagttggaagcatctgctgtactcctgagctgttgcctgggtggctggaagaccgtgggcaggaaggtgagcattgtgcctaaccagaagagaacaggatgcacactcgtgcgtgcgtgcgtgtgtgtgtgtgtgtgtgtgtgtgtgtgtgtgtgtgtgtatgtatacacgtggaccacgaccacacgttcatttgtctccttttcctgctggcttggcactgcatgtagagttgagcgtgggtgtcctgtgcttcctggcaggtgtcaccctctgaaataagtctgtacgaggctcaccattgctttcaggggaggtggagacacctctggtatcatcgagaaggaccttgtgtgctgtccccagagcctgggagcccttgcacggactcagcggggggtgcagtggggagtgggctttttagctgccacaccttggccaggtgcctggaaagagggaggggcttcatcagttttgggataaggcttggtagatgtgagcccggcttggaagtaagatcccaggagccctctgaggatccagagggatggcttgagagtgaacctgccctgctgcctaacctttaagttcctgtgggccacatgaacttcctatggctgtgaaagtgggtttgtgcaaaccgtgtagcttgtacccacagacatttattgtgttagggttatgaaggtctgaaatctaagccagattgaagccagagtgtggaaaggtgggttcctgtagggcctccagagatctgtccctggcctcttcttgctctggtggttcctggcacctctggcttgctctgatgatctctgcctctgtcgcattgtggtcacctcatatgctaatcaggcctcctctgcctctctgtggtccgggacacctgtgattgtggctggctcatctgggtcacactctatgtcactctgtattcagacccaaaagttgccttgatgagtaaagtcatggcactttcgggctgaggacaggtcattggtcagcctggtgtgtcttaagacgtgatacttctaaggcataaaaatgctaaaataaattgggtcaaggaaactaaaaatgcatctacttctttaaaaaattgcttttaaagatatggtttcctgtattgcccaggctttgttccaaggctggccttgaactctgatcttcctgcttctacctccagaacattgagattatagggatttgccaccacaggtgggttgtgtggtgctgggaggattgaacctagggcttctcgcgtgctagcagggtgtcctaccaactcagctgtgtccttagcccaacttccaattctttttttctttaagcacatgtttttccagctgggagtggtatatacctgtcatcatggcatcggggaaactgaggttggaggacccagagtctgggctatcctgggcttccaatactcgtgcaatgtaaagcagtccccccacccctggtcgtaatataaatggtcttggttctgaactgcctgcggggtcttttcatctcatagagtgggaaccccacatcctaaggagccagcacccttggtagccagtaatctgctcgctctcgctctctgaatcattttttaaagatttattttatttattatatgtaagtacactgtagctgtcttcacacaccagaggagggaatcaggtcttgtcacagatggttgtgagccaccatgtggttgctgggatttgaactcaggacctctggaagagcagtcagtgctctttaccactgggccatgtctccagccctctgaattatttttaaagtgtactcctatgtgactttagaataaataaacacagcttggcgcgttagctgttggaaggctatacatggagcggaagccaaagtgtggatggagacccaggcaccggaagggcaggagttgaagtagcctgggtgtctgtcacctcctcctctcttgctcttttctgcttcggtacccccctccttctgaatccagctgatgggaccctggtttgcttccttcccaagtcttcctcacgcccaagcttcaggggcctctacgcagaaatggctctgagctcctcagccctgggtgtctggcaatgcacagtgagccaggccagcagctggctccccctgggttgggctccttctcccatgccccttcaagccagtgtgaatgagaagggacatccaggagcgagctgatggtgtctttggcacagtctacatggtgtggggccaggtattcattgagttgattccttacgacaaactcccctctccctgacagtgaacctggggacacggctctgcatctctgtgatttttattttacttttttgaagcctattgttccacatagcccagactggcctccaactcaccatgtagccgaggataaccctgaactcctcctccacatgctgtgttgggattacaggaatgtgccaccatgtcctgaatatgaagtgttcaaaccaaggcttcatgaatgtcatgtaagcgctttactaactagctacttccaccttctgaggggggggaggaagggagggagggggagggagagagatcaggtctcaagctggagagatggctcagcagttaagggcatttaccgttgttccaaaggactgaggttaccccagcatcacagggccgctcacagccatctgtaactccagttccagggggatccaaccccctcttctggcctcctaaggcactgcacactcgtagtgcacagacatacaggaagttaaaatacccaaatacataaaataaaaataaataaatattttaaaaaggacaaggtcagccaggcggtggtggtgcacacttttaatcccagcactggggaggcagaggcaggcggatctctgtgagttcaaggccagcctggtctacaacgtgagttccaggacagccagggctgttctacagagaggtcttctgtagctcaggttggcctctcatgaacctgaggctggccctgaactcctgcacctcctaccctctactatacgtggctcctcaatacccttttaaaacctttgattggttgaccgactttttttttttttaaaagtatttgcgtgtgcataggtcccttcacaggagtacacatggccccttggagcttgcgtcccaggcacttgtgagctgtctgacatgggtgctggagaccaaactcccagccctcctctggagcaactgaatgtgcccttaaccacagcccctccagtccctcaacaggaagcatggctttcatgagctgggttctctccacccctaaatgtggcttgtagatctggtactacaagtggccaggctctccaagaagacttctgagtcagtggctctgaactgagagcagtaatggggtacagggtagagcacccctctagccagctcatgggactgtaatgccccagtctagggccggtctgggcaatgtggtgccagagaaatcagaggctctctggattccagtgtcttagcacggaaaggaagaagtatgtgaaatatctctgccattttcacgttggtgacatcttgaactgataatattttggctctgtgagatcaattaaatcgggccacgtggtccctcctgtcgtcctccccccacccccagtggtagcagaagtttaaggttccatctgtaacttgcatcttgggctttgtgccagcgggtctgatggcacttgagtggctatcaggctgcttccttggggatggatgggatggcctgcttgggaaagaagcctcagaaagccccaccctgcccccttcatgctctggaggacgcctctcccccatttggtgctactgaatgagactctgagctgcacaaagtcaccatgtacggagtgccatgtgctacgcccaggctggcaatctggaaagctcactggagctgagcacaggggctcccagagagctggaggattagtgtgtccaaggtaaaggttcagaagagacgaggccctgtgtccctagaaaggagaggcagtagggcagttgacggtccgttggtcagctttgacatgggttgataggagtccctctactgaactgctggggccgggctgggtgataagggaggggtggagggggagcgcttcctggtttgaatggacctgctgatcaactgtgactggagttggtgtatcaactccagactaggaaggcagattcctaagatgcggcgacctggggaggcctggggctcctatgttctgctggtaggtagggcagagtcacgctgaggatggaataggagagtgtgcacacacgaggctctggggcattcgttcctgcagactgggggatggaggtcacatgggagaaatctgtcactggccctaggcccctccagagttactaaaggctcctctccccttgaactaattgcttctgctcaaatcttacccccagcactcccagtgtgggagctggcctggggccaccgtggccatgcctgagcctgggagtgactcattccaggtcagaggttatagggtctggcagatcccagcatcccagcatccaggcccagccccagccccagaagtatccgctcctattctttggaccccctggctcatcactctcagggtcccagaacatcatagggcctgcaaggagttgggggaggagactactgactcattgcccagcccccacggaggctcaggaacagtgggaagaagcaggcgccagaacacaaccggagtccctgaggctccagaacagagtcagggtgagccagccccagcccagccccaggttctggcttcctctcttgcttctccctcctttggttgcagccagcagagcccacttaagtaagttggtcgagctgtctcagctgcccagaagcctatgggggggtgaggggattgggagagggcggggcctaccaaaacactgaaggctgacagaagaccaagatgcatgcctgttgtctgacgggttggggtagtgccaggccagggtaccatgtgcaggttcaatgtaccatgtgcagggtcaatggaagacccttctggctgggaagagggtgccgtgattctggattggcacagacttgggcaaacatcggttaaaggctagggctgcatggctccaaggaccatactgtaactctctacgtaacagcgcctccgcggataccctgtcattttcctcttatccgcagacttgccctgctgctgtcgcctgcagccggtgcacctctccccgcctcctcgtcccctcgccctgcccctcgtagcaattccccagcaagcctccctccgcaggccgtcctgagccctcctacctctctgccccacactctgggaggctccttgttccgaggccacaaagcccctttgatcctctgctcggctccgagccatgtgacccggtgggcgggccgcagctctccagcgtccaggcagcccgactttcagctgctggggtgagtcctcgctctttgttcttccagcccctcacagtttgctccgggggcctccaggtggtggggcccgcctggccgccccgatgggtgcattgggactgggatccgggtagccccggggcctggaactctggttggcagaccggccctgggttcctgggagaataggcggcgggatgccgggtctccacgcgggaaccagattttcgatcgcagaatagaagaaaaaggggctttgtgtgaccacagctatctctttgtgaatgtttggccaactccaccgagtggtgaagagtgtcttggagcacgttgcccccgcaaggggctctctgacttctagccggggcaagagcagaggtgtattgaaggcttcttgcaaaaatctctccacacagagttatcagcttctaatagtgggcggtttccaacgctggctggaaattagttcctgcgggctgttacaaaggtggcatattagagaccacaggggtgcactgtggtgggataccaccatcggacccttgtattctctggcttttggtgatgtgctgagcccaggagggtgttgctgggtggggtgggggtttggtatgcatttgttttgctagagaatgtgcaatgggggtgtctgccttctggagccttgtgttggaacctgtgctctgtgtaagagccaggggcaagcagtgtcctacagcaggctctgcagccaggcggagacgagaacctgggccagcacagaatggtcacttgcatccaagcacagagggaaagagggaaatgccttcccctcctggagaccgcctgagtttccgacctactgtgcgcacccccacccccaccccactctaaggaaaagctgccggctcttggtcagaagtctgtagagaagatctgctccccaagagaagtgtgagattccttttcttagagaaaaaatgtatcacccggaagcagcccagtagtgggttctggccgctctgtgctgggcagagttggaatttggttcagatctcacgtggaaagcccagaggacagtgaagacgggatctcctgcaatgacgtaggccccccctcattcactctctgtttctagcatcatggggcccttgggtcgctcactttaccttagtttcgcttggcagccaggcagctcctttttagcaaataggaaaactgtgcttattaagccctctggatgggcagccagcctccaccccaggcctgctggggaggcggttcacccttctcttcttgggcctctttcagggtacgaggtagaggtaggaggcagctttgaacttatggctgccccactgtctcagcctcctggatgcagggattctaggtgtgtacctttaaaactttggcctctgggaaggaacctgagttgtagctgacctggctgactctttcggtttctgggcattctttattggtttaccccaggttctgttacatctactggagcctgttcatatgtctaccgggtgggccctgtggtcatcatggtgacagctcagccggtatgcacaagaacctactgttcgtggggtgaggtggtagccacctcggtggaagccagctccagaaaggaggccaggttcccagtgtggattgtcacaagaatgagataagtctccatgccaggtctaagtgggaccatcttgggcctgtggcgtcctctgactaccagatccactgccctccagctctgggacatgggtcaggagtcccctacccattgggcaaccacagtgctcttgcctgtcatccccgccccctcccttccctgccacaatatcctccccagcttcctgttgtgtcattgctcctgtcagatagggtggctctgccggggctgaggcccctttttacagagagggccccacagcctggggcaggcagcacagattccctgcctgtgtcaaaggtctctaggaagccagcattgaagctccatttccggtcttccattcctccacacagtaccgtctccactggctttcccacaccaccccggaagtttctaggcttcctctctcacttgctggccctgtgtgtgggaagaacagctttattttaatgcatgtaggcaaaaccccagtggccactggcagaggctaggtgggcctccttgtccttaccatcccccttcctccatagactaagccgatgttgccagttgagctttaggaaatggtctgggagtggtgtcccacccagagggtcccacttcctacagtttggtcttttgaaaagtttccagccaactctacccttcgctctctgggtaggctctgaataagctctgagggctctcccagactctctgccttccagcactaagctttgatttgtttattgagcaccggctccgttccttgggcaggtagggacctgccctccaggagcggcagagccttggactccttcccaaggaagacttctcagggtggctgctgtgcagcgtagcgtcctgtgtgttctgtgagtggggtggggctgggggctcctacctgcatctggggaggtgggcatttctgtactccacacctgagacctccacctgccaggtctctgcagccacagctgcagagtctccacccagcccgcttggctgcatgctgagcccaccttggtgcctgagggttgggtgggcctacctggctcttcctttccattctctgtcacgcatcctgaggagcacaccatccaggctgtgagcctaggaaagagagatttgcactaaggactgtggagcctgatcttgtcttcctgcagccctggagctgcttaatctggttctaccacccccacccctctgcagcagagctcaccaccactgtccccaagtcactggcaccggggttggggtgtggggcctgggcatcctttaaggcaggatgcagctcagtgcagaagcccttgaaagacacagaggcttagagtttgtgagaaggtcatcaggaaaagatgctgtcgtgactttattcccagcacttgggaggcagaagcaggcagctttctgtgagttcaaggccagcctggtctacagagtgagtctcgggacagccaagtctatacaaaaaaccctgtcttaaaaaaaaaaaaacaaaaaaacaaaaaaaaaaacaaccaaacaaaaatgcttgctatcagccttcacagggtgagttctatctactccatgtggtagccgtctcctacaggctgtcccgtaaactttacccatgtgccatgccatgacacatgtgcctgtacacagacacacagacacacacgttaaaattgtgttaaaagataagctattggctggctgtggagcaagggtggctggtttaagcactgtcctaatctgtgtacagtgcatggatcttgcccagggctccaacccctcctaattgcttagcatcttcctgaagccaagatttgggggggcatcattgagcacctcaggctgctggctggccacatgaggactgaagtcctcgcacccttgtctttactcttcctgcttctgacagttgtatgtcccccatctcaccatcttactttgagtttttgagagagggactttcccaaaactccctatatatccaaggatgacctatacttctgctctttccagggactgaactcaagacttcatccacgttaggagagccaactctacccactgagctataactccagtctcctttttggtcatgtgaggcgaagtctgattctgtaactcaggctgaccttgaacttaacatgcctcctgcttgagcctcccaggtggcaccgtgcagggtttctgccttgcttttgggtgctaggtgccaagcacaggctggtcaccagaggtcgtgggacagttgtccttccacagtggaatgtactcagagctcagtgctccaggatctcttatcttatctcccaggcctcactccaggtgcctgtcaccactggtggaggagataagacagcctggtccaactggggagtgaacccctttgctgtcctattgggggtctgggtatgcaggtctggccctgggcgtgctgaggctggccctcctgttcagtggtgattttagtgtcctctctgttctcagtggccactgagatttattgatcgctgtgaccccattctggatgacctgggtgcttgattggttaatgtttgaatgactagggaccagctttgtgtgacctcagattttttactttagtccaaatgttttctggtttcaccaaggccagctcaggggccttgcagggattccgttctccctgtctttctcccatgtgagaattttaaggaaagaggacagatagggtctctccctctccctctcctgaggaggcgctggggctggggagttggctcactgggccaaaggcttgctgcaccatcatgatgatagagttggatccttcagaatctacagcaaaggacaggtgtgtgacactagtaatcccagcctaatcccagcaccagggaggaggcaggtggagtctcgctcctggccagccagcctggttgaatgggtaagctctgggtatagcaatgagaccctatgtcaaaatacaaagannnnnnnnnnnnnnnnnnnnnnnnnnnnnnnnnnnnnnnnnnnnnnnnnnnnnnnnnnnnnnnnnnnnnnnnnnnnnnnnnnnnnnnnnnnnnnnnnnnnnnnnnnnnnnnnnnnnnnnnnnnnnnnnnnnnnnnnnnnnnnnnnnnnnnnnnnnnnnnnnnnnnnnnnnnnnnnnnnnnnnnnnnnnnnnnnnnnnnnnnnnnnnnnnnnnnnnnnnnnnnnnnnnnnnnnnnnnnnnnnnnnnnnnnnnnnnnnnnnnnnnnnnnnnnnnnnnnnnnnnnnnnnnnnnnnnnnnnnnnnnnnnnnnnnnnnnnnnnnnnnnnnnnnnnnnnnnnnnnnnnnnnnnnnnnnnnnnnnnnnnnnnnnnnnnnnnnnnnnnnnnnnnnnnnnnnnnnnnnnnnnnnaggacccccgtgggagctaaaggtttggggtacaggagcgggtcttctttgcagcactgagctggagaggtgcctcctactgcagcagcgggtaggatgtttgttgtgggttctgagacactgacgtctgtacagcggtccggtccgttgactgggagtgagccctgtttctggtggttggcggtggaggaatggcggagagggatgccggtagccactggggagcagaggactttgcatcctggcacagaggagctctgtgactagtttatacccaccggctctgaataagtatttgctcttccatcactgctgctgggttgagtggagccaccacaagctgacctggtaaccggtgactgtaaacttggtagttgatggctgaggtctctgtaggggtgcctgagccttttctggtgtgtgtgtgtgtgtgtgtgtgtgtgtgtgtgtgtgtgtgtgtgtgtgcatatttgaggggatatgcacagatgtatatggagtccagaggtcaaccttggggctacctctttgtattttgacatagggtctcattgctatacccagagcttacccattcaaccaggctggctggccaggagcgagactccacctgcctcctccctggtgctgggattaggctgggattactagtgtcacacacctgtcctttgctgtagattctgaaggatccaactctatcatcatgatggtgcagcaagcctttggcccagtgagccaactccccagccccagcgcctcctccttctgagaggagaagtccagcttaatgtacacacttgcttagaggatagctgcagatgagatccccgcagtgagccaccctgggcggagccaaagccctctgcaaccagagggactgattgcgagtctccacctccatgtgggaaggttggccaggctccctggggcccagtgaacctccgtggcatgtatttaggagggtgttacttcctcctcttggtgacttctggagcctggccaatgcaggagggtagaggctgatctctgggagttggaccgttggctgtcagttcagctgcttgtgtaccaagtcccctcagacaatggaagaatcgtgacgttctccactgtgtagtcttcatccagctttaatgggtgccccttgactcttataccttagcaccctaaggatgctgaggactcctgagggcaggcaatagggtggctcagctcccagagagtggagcatcctgtgtaaagcctggaacctttgtagaagtagggttagcttaagatggaaggcttaagttaagaaagggtgcctgctttggctgtgactaaggcctgtttagaagatgaggtggaacatcgaggaaagagcagacggttaaacatactgcagggcggttgggagacccactgtgctcattcatgatgggagacctattatgggtcaggttgggagacctactgtgctcatgatgagagacccaatgtgggtcaggatgggagacctactgtgctcaggatgggagacctactgtgctcaggatgggaggcccactgtgggtcaggagaccaaggtcaaagttctggtctgcctttgctattggacatgcagctggcatattgtgagcttctggcatcttgctggctttgagactaactcactgcaagcttttaacactgaagcacttcatgcctgtaaccctaatacttgtgaggtagaggcaggaaagacatgagtttgaggctggcccgggctacatagtaagatctagtcccaatgtgctcccccaaggatatatgtgatgtcaggacacagacatttagggaagtggacctccaggttctaccttgggctatagctctgtggggttttcctggggcgagatgaagatggtcccacccatctgcacaggatttggagagtagaggtctgagtgtcctgggctgcggctgctgtcgagagccaagcattgaagataggtcttccagaagtttctgaatcttgggtaatatgtcccagagcttaaagtagaggcaatgcctggggccctaagatttcaacagtacttgagccaaggtagctctggtttgaggcaggagggagggaccgctcaggatttggcagtgtggacgtgttcaggggacaggggagaacttgggaagtgtgggtccctggatcatggagatgttacaagtaaggaagggtcaggggtgtcccccacacccatgtgccgccctcacactacccaccctcagacattgcctgcttcctgctcgcctggcaacagtcaggctgttcccaggccgacgcttagctgttcctttccaggtgttgtggccaccttcccaggcccctccatggttagctgtggacactcacacacacacacaccgccgtgtgcatctcctgtccagtcctgaggctgccctgggggccacagcgacatcctccttccactgacccacagatgcacttcacagtacccttgaagcatctgtccacacataggatgtgccatcgtgattgtgacccagccttggtctgggagaactgtgcagcccccagccaggcccacccactgcctttttttttttcaaaaggaggggcatagatgacctcactgtgggcttcagcatctccatctgtctaagtcagcagagatctctctcgtcctagttcacaggagctgcccctgagaggcttggaggtttgggagtggatagtgcaggaagttgcaggtgcccccagtgtgtcagcccctttgtccatccagaggtcttcctccctttggggctgtgtggccctaacaggtgggctttaccccagtcctgtgtgaaggaggttgtgacttcctgggaacgttcagcacccaggtttgagggcccagcagcccctgcatttggcttgctcagatctcgatacaggtggccgcaggactgagaatagagcaaagaggactctacacgtgaggggcacgggaggaaaacagcaggcacaggatctgcacccaggtcctggcctctggcttcgggattcccttgccagtccaggcccgggaaggcaccagaaagcagaagcaggaagctgcatgctcttgtcttccttgccggtaattggtgggcctgagggactatgaattggattcctgatacacaaacggtcaggagagtagccacaggctcacaatgaggctagccccttccggtctcttcctcacactggaggcacttcttgcctcttaattctttaacggacaactaacctgatcaagatgcctaaatggggtgcggtgaggtggggatagacaccgtcccctgcaaccgccaatcctacaggcctaagcccggagagacaagcttccgaagggacgtggaatgtatgcaggcgagcatggtgcccccggggccacagtttatggagaacatttctggactgttctgttaccccaccaccaccacacaaattaaaccaaaaattaaatgttagccaccaatgctttaagcaactgcaggaaatgtggagtcttcttccctgcactgcccccatccctctgtgactgtatcctagcactgtgtctactctttagggacagccggccagccaacttggaagccctattgggcacagcttccagaagtttgccagcccccccccccctttgtccccttgtccttgggagaaattaccatatgaatgtcgttccttcccagcgcctgggttggagaggccctgggagaagactggctcccaggctgccgttccggtgttggctgaggaccatccacggcatgccagttttcctggacatcggttgtctacatcccataatagatctagctcagtcctgggtttgagaagaggtggaagaagaggctgcaggtgtagggatctcagctgggaggaggctgtgggacccccagccacttgggaccccgcccttgtacctcctcattaacctgtcctgagaaacgtgttattctgggccttcttgcgatgttgctaattactggaggaatccagcgggcgcgagggtatggggcagtgcagttactgtgaatgaatggcttgtggactgtagagagtttggcctgtcgatgttctagcagctctgatggtctggcttgagtcaggcctcactcaggtcgggagtttccattgagttcctggttgcatctcagacactaggttcactttgcaacctgtgtgagtcacgctggtgtttgggccaccaaaacatgctgtcttgtatccccccacccacccactctggctacaaaatattgaaagtatctcaggagatgccacctggcagtggagtttcttctagacagcatttagagatggtagcaagacccagtccttgacatgggccgtaataagcggtctgaatggaacagaagtgacatcgccagtggaggcccaggtgagggccctgtcctccgtatctatatctgcccctcgctctgctctgtttgctcagtctgagcctggcattaggacaagatggaaaaaagataggactgaagcccaggcaaggccagcctggcccctagttgcatttgacgcctgacctcagtggaccctgatctgagtatcctgggaaagtccttccttctgtccccttcctcagctctacatggcttctataggtgacaatatccagaaattgttaaagtcacatttgggtgccgggacagagattcatcatgcacacacacacacacaccccgtaccgaagaaagggaatcggggagtacctccaggcccccattgagttatccagccaggttcacagtgacctcagatgttagaggccctgctggcatgaagagtcacggggtgcacttactatagcctgtgcaacttgctaaaacagggaagcccaccagcatagattagctgtcctgggaagaccgaggagcagggcagagtacagcagcagggaaagaatgttctagacaggctgactcttttttttttttttttttttttttttttttttttttttttttttttagacagggtttctctgtgtagccctggctatcctggaactcactctgtagaccaggctggcctcgaactcagaaatccgcctgcctctgcctcccaagtgctgggattaaaggcttgtgccaccactgccgggctagacaggctgactcttaagagccttttctgaagagctgagaggagtttggaaggcgttcatatgtcggagagtgaaggggtggcatgtgcatttggctaacagcagctgcatgcaccatgttctgtgtctgtcaccctccaccttcacaatggtcttaggggacaaggattatctttgtgtgcacagtgtcgtacagctcagatatttgctcaatcccactgttccatggtacgtcagaggtgggagaaggtaaaggggcccaattccgtgtcaccctgggtgctggggacaccggccattgatttgaagcaaagacaaggtaggactaggatatgtgtcaaaactgtccttccagggctggggagatggctctgagtaaaacgcgacccaagtttggtttctggaacccaggtaaaatctgggtgcaggcatgtgggtacctgtggcattagtgtaccgccaatgggagatagagggataactaacagcatacacagccttgaataagacaccctaactggatttgtggtgataaaacagaggggggaccattgtggtatagctggagacagcattcccaatagtgggggcaggggcagggtacccagagttcatttacacttccagacagttcttgcatatatagacttggacaacagtagctatagataccaaacacttagtgcaggacctggtatatggagtcttgatacatgcctgttgaactgtgatgagcatttgtctatctgtcacctctccatccgttcatccatctacccacttgtctgtccatccattcacctgtctgaccatccatctacccacctgtccgtctgtctgtcccatccatccatctattcatccatctatccgtccatctacccgtgtctgtccatctacccattcgtccatccacccatccatccatccatccatccaaccacccatctgtctatccacctatccatccatccgttgtccatttgtcagtctgcctgcccacccatccttactctctgttcaggcagcattacatgacactgcttggtcattcatttcaacagtgcgtcataggctgccctgaggcatttgctctacttggttggttgcttctccttagagaactaggtcatggtgtgaggatctttcaacatacactggtgccgagggattcgtgttccctggtggatggctagaattcttgggtttcaggatctccccaggacagggatctgtagctgcaagagtgagtggctcatctcagttcttctgcctgtccttgttggactccataatacagtcacaggtttcttcttccttaaggtcctgtggtcacgccctcttgcaccagccaggaccagcttctctctacctggcccttaagaccctgccttcagtctcgtcctgtcccatgtcatgccctgacccccacccccaccacaacaaagtgaatggggcacccggaagcctttggcagtatcagctgacctaggcagaaaagatctgtatctctggggtcaggcctttgtccacgggatttctggcggcagggggtaggagggtagaggggtagggcggggtgtctactttttgttatttcaaatgatttcataagttgggggaacctttgaccatgtttcacccaccccaagctctggtgtatgtcagcagctgacagcagctgataggacaggggtcaagggattgggaagcagctctgtcgcctccccccccttaggggacatccctgataagaggaaattcttgtaataaatggccagtgtccacagtggggtgatggagtggcctctctcccacccccttctttctccatagacatttgtcaagagcaaagggaatctgtggcccagcagcctcgatggcccctgctgcagtaggacatgccagtggcgtcctgggtagggctggatcttcaggtgcagctgttgctgttggagattcctgggggtgggcagagtcagggctgccttccccgatgctgctatgtaatagatgaccccaaggatgggcccaagcagggtggtcagtggaccccggaaccggaaccgtatttaaatccctgacccagaactttggagggctctgcagaggccttagtgtgctgttggaaatctgctgtggcttttgaggaaatgaatgagaagggcttgcaggttgcagcctgccctgagcaaaggttgatgtctcaataggcccagcctagtgagaaactgctagctgtaaatgaagaacagaaggggtctcctcgaggggggtggggcgcccctggacttggtccaagtttgcctctgtggattggggccaattgaaaccacgttggcagaagtacagggctccttgagagtcctccctacaatagaggggaggttgggtgagggaagcttggcaaacagccaaagcagggaccctactcccttctttgggatgcctagggcccctgcctctgcacacctccccaccctgccctcatcgaaggaaaggaggagtggatgggatgaagtctcaaacttctctgtccgtcccaggcccttatcggacgcaaggtcacaagcatctcccagcagagagcagcttgcggaaaccacatcagggcagtgttaagtcccctcttggaacttggactggggaaggcactccagctgggagaggtgggaagcgctccctttgcaaatccctctctactgaggccaaagccaaggccaagcctttgtgttgggtttccaagtgggggtccgggggcggtgcaggaggagtctcagatttctggcatccatgcttttaaccagactccaaggagacacttcctgccccaaacaaagtgtgaagtgtaattcgatttgacttacttatcaaattagatgagccatgtgcacttttaaaaagttcggcttttgaaaccgggcacatgaatttgcaagatttgatcatttatatgcagtttccatctttggaacaggacagggagcctcttgtgacatttatggggagcgcagggtcctccggtgagtcagcaggggccagggcactgtgaaggcagggtgaagaagatgggggaagtcccagctccccagaaagcagccttccacatctctgcccacccatgtgctgacaacctgggtcgagccgcccagggagtcagctgctagagccttgacccctctaacgtgggctcctcagacttatgtcccatgctccttgactctgtatccctcctgcatttgtccatctctccagccacagaagctgctgatctagatcatctgtgtggtgtgtgtgtgtgtgtgtgtgtgtgtgtgtgtgtccatacgtgtgtgtgcgcagatgtacaagcaggtggaaaccagaggaatatgctgaccttcgtcaatcacctttttttgtgtgacagggtctctcactgaaggtctgtcagttcagcttctggaatgcctctctgtttccacagcctccagctctggcacatagagtcatcattggctcttacaggagtactggggatttgaactcgggtcctcagtaattccataacaagtgtttttatccactgagccattctcccagcctcaagtcctcacttttttgtggcgtaacattcctgtatcggggagtctgtgggggtttgtcgtggctccatttaaaatcttactctgtaaagcttcctccgtgcacctgcctgagcctgccctttcacccactggtcagtttcttagcacagtgtatctgctgactgaccttgttgtggatctgatctctgaggacataggaatctgccgccattactgtcgctctctctccagggcgagtcctgctcctctggcccccagctctgcacgggccagcttcccacatggctatcttactttattttatttttttcctcacctttatttccccagtgggctcattaggctcctctctgcccactcctgcctacctggtgcagagaatcacctctgagcctttgtgagtccccctgtctcctcgcggggcctcctggaggggagtttttatactacacggacactgatgtctgtcccaggtgtggctccaatggagagttctagtctggcctccttgttctaatgtgtggcctctcatgtgccaggagcgccctggagtcagccctacttgaggctcagtagctggtggtaaagaacatatccaccctttgcccttggggtgggtttttttttccaaactttactgaattaaagtgatactaccccaggaaacctgggaagggccaataacctgtccagctagctgggtgggagaccccgacaatcctgggccctgccttcagactctgggggtttaagttcaaggccccaacacagggccccctactctggaggcagtaccttccgaatgatgagggtgtggtgcattttgggatgctcatcttaccgcagatccagggctgatcttgtcacactggctgtagcctgggtgccagttccctggctgtccttggcaagcctgttagcctgagccttctttctcatggccagttgggtcaaggtcagccttggtctcatcctctctgggagcccctcctaaattgtggcctacggccctgtcccagtaaatgtgaagggtgatataatcttgtcatctttggcaggccctggggtggggggagaatgtgttacacagtgagtaagtctgcagatggtggtggttggacccaccacccactggagaatagctgggatttacagcgggtgtctggggcaggaacaggatggggtagatgggcctgcacacacagtaggacccacggtctaccaaaagtagctttagctacttaccacccctcagaaactcctctggctgggagatgactggctggctggctacttgctcagagcattgtgtgccccgttagcatccgcagaatctcagcttgagaatctcagcttgagtgtcagtgtctggggctcaggcatcctgagctgcacactggcaggtggcctggccggcctctctgtccaactaggctataaacagctgcccggtgtgccccccacccctcgcatcagccatgaagagtggtctccagccgtgtttattcatgatgtcatgtaaccattgctcctgtctaattcggtgcattttatcaccctggagggaaacgtcatgctggataaagagtttcttctcctcctactgcctctgtggatctgccttttccgagtgttacatagtgtcagtcacaccccggagtccctgtttctttagctcagtatgtatttcaaggttcatttgttgtctgccatatccgtaatctttccttcttatgggagagctgtgttccctcagattcacttgctacacttattaatgcagctgtgaacaacttagcgctctctctctctctctctctctctctctctctgtgtgtgtgtgtgtgtgtgtgtgtgtgtgtgtgtgtgtgtgtgtctgtatgtgcatgtacctactccacagcactggtgtggaggtcacgggatgacttgggagtgtctgttctctagtcccagagacaacgctctcatgactggcaggcgtttccagccttgctggtggttagctttctcgagtagtcatttctgcttcttgctgggctaggactcaaggatgcccctgagcaggctgcagccttgggtggctgaggagggagggtgtcagggaacacactcctgaccagtaggcaggtgtcagagcacagaactcatgtccaagacctagtgttccaggagtgagcagtccagaaaaggtcttgcctctgctcatgtgaccatccagtggcatttcaggaaagagtcagcgtgtagacctcatgtcccctctgtaaagtgggagtgccaggctgcctgatacacgtgtcaggctcacgtaggtatctaagactgagatgagctaaaatggattcttaccgtgcatctttgctgaattagctcgggagtcacaggcagatgcacttggctggttcctcagaaataaaaatagaacggctcacatctggatgtatgtcccaaaccatcgaaagaatgctcttgctaggcatggttggtgtatgcctgtaatcccagtactcagagggctgaggcagggggatcattgagtctgaagctagactgtatataagagagagcctcagggaaggggggagagagggagagctagcctaagctctcaagattagctctaagggtgttaattattctgtatgaaataaggcaaaagccagagatcatctaaccccatggtggattctgggaaggcctgtggtcgctcctggagctccaggtctgggatcccaggcaactctgggtggaggggtctacctcctaaccgggcaggcaggtggatggggaggccctcccaggaggaagggtcacaggggtaggccagagatgtccagagcccctggagagcatggggctctactgtgttcttattatttctcaagcaggccctctggcaggctggatgtttagcttggtttgggcttctgctgtgaaccttaatacatggagaagggccacctggggcccgaggtgtgccttccttgactgggggcgattagggagagttgggggacagccacacctcctttcactgttgagcagagaggtagggggagggcaaagtgagtctcagactcataaacagatggaagcaattttcagtcatgtgcgcaaggcctgaacccctgcacggcaaggcagggccccgtgtcgttctcccaggaagcgggccccaaagccacaggttctagggccagatgttacaaggtctttgtttatttaaagatgcccgaaacacaggagagtatttctgagtggagagctgacagacactcttgaagccttgtggaggggactgacctgggttggggatgctcctgatggcaggcactgtcccttaggactgtctgtgtcattgtttgggggcgtctggaccccgtggcagctcctgctgtgtttacaagcattctcttgttcaattgcctcccctctcccaccacccctctcccgccacatgccagaagtagagttgcctgcaccctgtggaggccgaggaacaggaagttactgaccagtaaactagatgcctgtgggggtggtccccacatctccttcctgaagctagctttgcaagccatttctcctgtcctttctgccactcaagccttgagaagatgctgagaggaagtgtgtccggctttgctcccgctggacatgctagtaaaacggagagaaaagctgccaggccagagatggtcagggttgagcgagctgaggacgtctgggacgagtcagcttgagtttagtggtttccccggacgtggagagacagtttaaccaaagcctgaaaaagcccctatgctacagacccatcattttgctgcttcctggcccctgctcacttggaatggtgcccccccccccccagcacctttggtcggttcccttcctctctgagggaggagaaggcacaagtattcattgagcctctttgaggttagcgtgcgtgggaacagacataaggaaaggaaactgggaagcaactggtgacccctctgtcctggctgtgtttggggggctgggctgtggggtcataagttgagactgctgacattttccatagaggctgaaagaggtgcctctctagggcttatcagcaatgcatcagctctacctcgaccaccccacagcggcctgggtttcagagccgcactggcaggctatctcagaataacagttaggtatactgtaagcattttgttcaaccagaccgggtggaaccagccttgcacacccctgcagggtgtgagcacctacggtctccatctgaatcatcccccaggcttgggctctgaccatgcatgcactcagccacaggaggctctaaccctgacctactgaaggaagctgaagtcttcaagtttaacccctagcctgtccacagacctacaaaccaaatctggcctttgcgtgagggtgagggcacttgctgtcggccgtagcctgtttcctgcctatcctgcctggggactgtatgggtgggccacctgggagaagagacacccccagtgaggatgagtcaggtctggaagaggcaggtagaaatcagatcacccctcccctgggaactgcctgtggtcacctgttggaccgtgaagggccctgagtgctagctacagttactgtaagctctgagcagaggcgaagggcgtgtgccttcaaccctcaggacttggggccaacagaatatggaacaaagtccttgctgcccacctggaaccaggggagccctggttggcagagctggcagagacctgaggcagatggctgagtggtgtggaccagttgaatgctactgtaggggatttcagttctgagatgctatgcaggagtttcatgggcaagtcaccgacccctgcagccttggtttcccatctgagtgccatgctggctgcagatcccattctcacgtctctgtttctccctccccagactccgaggtgactcccagctgtgttggcgacatggctgacaaccctagagatgccatgctcaagcaggcccccgcgtcacggaacgaaaaggcccccatggagttcggctatgtggggatcgactccatcctggagcagatgcgcaggaaggctatgaaacagggcttcgagtttaacatcatggtggttggtgagtgttacaggccattcggggggctagcctcagccccagctgagatcttgcctccctttgcctcccgagttctgggattaagagtgccaccatatctggcctatcagctctccagggtagtgtctgggcaaatgtgtgccataggctgaggtcctaaaccaatagagtcagataggcttccgactgcagggcctctgtctggtgaattgtcaggatgtctgttctgcccagatcttcacacagcctacacatctcttaggggctgttgcagctacctaggcccacacctctggagtcttggtgtcccttcttgctttgggtggccttcctaggaccaggaaggagctctgctgagttaaaccaggccccaaatccccacattggggtttaaacccaaccctggacttccactgaggaggtgaagcctcaggcagggctatccaaggatgtcctggtcatagtgtgatgtagccatgaactgtgttcttggagagccttccaaccggccttcccttctctccccagggcagagcggcctcgggaagtccactttaatcaataccctcttcaagtccaaaatcagccggaagtcggtgcagcccacctcggaggaacgcatccccaagacgatcgaaatcaagtcgatcacccacggtcagcaccacggaggctgggtgtagggactgcgtcttcccagggtgtggggtcagagcatagcactagagaggtcacgtgaccccgtgggaaaattgggactgagtaatagtgggctggattcccatgggcccaccaggctgagctcccacagacatctgaggtttctttatactaagagtcatggctggcaccacccagaagaggtcacttgctccttggcatggcctcagctgttatcacagccctttctgggacgtaccaggctggccaggcaacctgaaggcttggggtgacccgcctgacttggggtgctatggtttgtgcagatattgaagagaagggggttcgaatgaagctgacagtgattgacacgccgggcttcggagaccacatcaacaatgagaactggtaggtcactgagagaaccttcctctatcagtaaaagccccactggtcttggggctccatgataccactggaggccagacccccctgccataagattatttcaaactctaaagccgtgcatttggggtctaacattctagatcaaaatggggtcacccggctcccatctggggtgggtttcccaccccagggcaaagatcagcatggggagtatggcagaaaatctgaaataaggctggtttgtctttgcaaccaccagcattcctgtatgaaatcagaggctggtgtcaagccagttctgggaattagcctgttataggggcctgggagggcgggcttagagaggacgcgggcaggagggagcattcagggtgcaggctaacccggctctccatgcagctggcagcccattatgaagttcatcaatgaccaatatgagaagtacctgcaggaggaagtcaacatcaaccggaagaagcgcattcccgacacccgtgtccactgctgcctctacttcatcccagccaccggccactcgtatgtcccatgctgggccctttgtcttgatggtgggaatccccagttcccatacaagcaggattctgtctgggcacagggacaggggcactgagtcagagctgtgtcagcaactgtcatggggcgtctgtgcctacagaagttctccatgacctctagactgggcggttccacgcccactctgccttcttccctttgtgcacagagctgaggacagggcagactctggggtgttctagaatccggtagtcagtctctgcagatggaatgagactctcgggctgtacatgtgcctgcccccatttcccgtccttgacaaagatgcttttagggcctgggaggcttcggaattccaggtgcctttcagaatctccctttggaatctcccggggcagctagactgtcagtggtctcagtgatcagggttcttggcttcctgtgagtctcatctgttcccagtacatccgtgttgttcctctccttgctggatatcctggtcgcttgtcctgactccgtgtagggtgcatgtctagtcctgggctcagagcagcaggagccggaggtggctcgtttagaagagttgaggagtcacagatttggtgctgctagagtgtgcacactccccggctgttcctggctcatccctgggtgtaagagcgtgggctttgaagggacttttcatcttgcaccctgtctagagggcaaaagtctcactggggtctggttggaaaaacccaaatatcgttgtctgagcttgccagtagtggctgtctccagtggggtccacaagagccagttctgggaattagcctgttataggggcctgggagggcgggcttagagaggacgcgggcagaagggagcattcagggtgcaggctaacccggcatgccattggcctcagctggggctggcttgtttggggttctgtagctgctccgagcacagcctcgggcaaggccaaggctgacagaggagacatggctgacatggcttcagcagggagagccagaggcagacacttccccagtggtgaccctctggactagggcccttcctccagccgctcagtcccaggggacagtagtggcttctggccatcattgcttggcttctgactgaagcttcacttcctgcaggctgtctgggcctgaagatactgctatggggaagatgccattccaatgagaaaatggtgcccaggcttggggtctgccagcctctgccccatccctggatcagaccctgggtctctgcagccaggctgacctgggaacagccagcctgtcccagggcctggagcttctggataccgtccctcgtgtctccttttccctggcattgaaaaccccacggcatgacagtgttgtgagccgagtcactctctgggtggacggtgtccagggccagttggactctgaagatcttgtggatgagggagcttaaagccagctttacaccagctccccaccctcagctccatgaggggagagtgctcaccctactaaggcccaaccttacccctccatcaacatggcccccactgggacccctaaacaaagtcttttgcactgttctgtttcaggctcaggcccctggacattgaattcatgaagcgcctaagcaaagtggtgaacattgtcccagtcatcgccaaggctgacacgctgaccctggaggagagggtctacttcaaacagcgggtaggactcatggcctctacccagccccttcccctccaggactgcccagacaagtgacaggcttgacaggggcctgtccagccctgggatatatgataggaaaggcgcctattcagctcttcacagcatgtgttcagccttgggggagcccctggcctttgtggatgtggggctcccccatatccagccgtctcagtggggttcagaagggagtagatcaagcagatgcaaatgtgtcagggccattggacccagcattcctgagttttattaagtgggacagtccacctcagtggcttcctccttctctgccatggtcagggccactgctgtctgggtgatagggctgtacctgcaggcgtctgcagtagggtaagccctgggcctcttctgtgtgaggtgactttggagcctcttgagagctccagcctggggttgtaagagaggcctcaaatccaattgcagaggctaccagggcttccttccctagctgtgtgttggggattttcccagcatgcataggggagggtagtcagggatgcatctgctggagaagagaccaggatgctccccggtgttttgagagcctggatctgcttgaacagataagacagtcagctattccctgggccaccctatattgacagccacgtgggctgtcagtaagtcgtcaagctggggagagtttcagcaggcaggtacaccctgggctaccatgctcatcctgagagggttttcggaaagagggcgcagcaagcctgagttgttttctaggggggagtggaggggggagctgcacagaaagcgcagggagactcaggacaatggctgcagggcccctcgggacaggcgagtgcttcttgatgcctaaggcttcagagctggtgatcctcggcgggggtggaactcaggcggtagagtgctctcctaccatcgagagggctcagggtttgatctcagcaccacatggaactgagcatgataactgtcgcctcccaggattaggaggtagaggcaggaggttcacaagtttgaggtcattcttgtttatgtagccagtttggggctagcctgagctacagactttgtttccaaaacgtggtggcagtggggctggaaagacggctcaggggttaagagcactcaggttcaattcgcagcacccacgtggcagctcacaaccagctccaagagaactcagtgtgccctcttctggcctccatgggcacttagcatacatgtggtacacatgcaggtgacacacttgtatatataaagtaaatgtaaaatgaatctttaaataaattagacatcctcagggtgggcccactcagagcctgcctttgttaggggatcatggctcaggcacctgagtggctgatagcctgattcaccctgtatctcccagatcactgcagacctgctgtccaacggcattgacgtgtacccgcagaaggagtttgatgaggacgcagaagaccggctggtgaacgaaaagttccgggtcagtgggtcaatctgcctctgggaggtcaggggcggtggacagatagacgggaggcagtctgtccactctgggtcctctgaaggcaaggcctgcagttttccaggcccaagacacagggtgttcgagggtggcactggccctgccgatcactgtgactaactcttccgtccctctttcaggagatgatcccatttgctgtggtgggcagcgaccatgagtatcaagtcaatggcaagaggattctgggaaggaagaccaagtggggcactatcgaaggtattggctgctatgctgctgcagtgttgaagctgtagttgggcctgggccgtcacccattgcgctgtgggtccctgtctcttgtaaggacactggctgtagtgtgcacctcatgtacaccagggtccctgaatttaatgactttgccagacttttgttactttgtcccacgcactgagggctggggctctgaactttcctggggtccagcaccccaggtgggatgggtccagggattttcttggctcttctctctactcttccaccctctttggaacggaggatggggaagggcagagctgcctggaagatgaaaacccactttgttccttgtgaccagtgtggtcaaaaggccccacagagaagcagagagttgaggctttgatttgggggaaatcccagttctctagggccccagtcttgcacccttcataggtgcaggctagacctctgtcctaaggtctaggcaaaacaggatggagcccaggatgacctggtactcaagtcctcctgcttggcctccggagcactgggatcataggtgccacaccccagctgctggaactctccgaggagcagtttactctaaggctctggtctggttggtgcttcctggctctgggcatagaggcctccagccaggaccaccctccccatagtggattaccatttaaccctttcagttccccaggtccctcccgctcatccttgtccagtgccaactcaaccttcctttaacacagttcctcatgctgtggtgacctccaaccataaaattattctcgttgctacttcataactgtaagtttgcaactgttacaaatcgtgaacatctgacactagcaggatgcctggggttgtaagtttgcaactgttacaaatcgtaaacatctgacacgcaggatgcttggggttgtgacccgtaggtggagaaccactgagtcactgggctagtaaccattggtcaggtgcttgccttgaattaaatgagttccacactctgccccccagaaaccaggtttgctgtttctgtgctgtttctgcgggatctatgatcttagtctttgagatgtggagccaggagggtcagggactccttcattttcacccaccctacagtgagctcggagccagcctgggctcccggagacactgtctaagaagaaagagcaagggagggaaagcagagtaagaaaacagaatgaatggacagccagggctccatactgggaggtggtctggcatgccacgtgaagccttgcactggagaccctggagttggaattgttgcctggtctttctgaggtgaccgctgaagagggcctgtcttccagcccctcccttcccctactgtgccctcctgtgggtctgccaggtggggtgtcctggggacagtctctgggtggttttggtgcccgtggcctcctgtagcactcccctcaatgtcaggtgttgaccccagaagtgactctaggggcctctctgaagctgttctctcaatagcttgtcctcagcttggttcccctcagtcgttccttcccatctttgatgtcttcctcatcctctaaatcctctccaggaatatgcaaggcaaggtttggaggagtaaagtttggggtaaaagccctgggactctaggagaggcattggatactaacgtgtctcttctggcccctgatggccaacttgggtactgcatgcactcaatgagaactcatttagccaggttagattactgttcccagctaaggatccaggcagcctctgggtacgccccctggtggtcgttcccacatccagcatccttgtaaagtgaacctggtgcaagttcctatcagggaccctgtgagttcataacttactaagtcccatccaatggggcctactcctaatccttggtacgcaccatctgaagtgtctgttccatccttggaaggtggccagagtactacctggaggatggaaagctacttggttcctcaaaagcgtcacaaagtcagaatacatccttggctcatttggtcttttgtgcccttaaggtccaagccatgctgatctcccgtttaaatttctcttacatttatttattaacttatttactttattggagggagagggcacgcacatgccaaaacacggatgtagtagtaagacgacagcttgcaagagttggctctcaccttctactgtgtggttctgggaatcaaactgcagtcattgggtttggcggcaaatgcccttatctactgagtcatttgctcattttattgagaaactgggtcagagaagccaacagaactcaccccagtccagaacacaaggaatgaggggtttatttgggctcacggttccagggtgcagtccatcatgctggggtgtcatggcggcacgacaatagactgttgatcgctgtgtatccgcagtcaggaagcagataaataaatgctggaattcagttcactttcttttttattcaactgggaaaactcggcccacaggatagtgctgcccacattccctgtgggtcttccctcagctgagcctctcatagacacactagaggcgagtctccctgttgactccgaaaccatcgagtggctgtcaatcatcctgcccagtgggcggggctttctggaagctgttggctttcccggggaggagaggaggggcttcctccccactgatcatctctccttctcttttccttagttgagaataccactcactgtgaatttgcttacctgcgggatctccttatcaggtgagtcagctctgaaggccccttgggaggaccggctctgggggttggtggtggtagatgggcgggaaaggccccaccctggccgcctgatgtcagccctgttctcgggaactgagctgaaaacaagctaacagaaacctgggaatggatgaagaaatgaggattctttctaacctttcgaagtcaccaggatgagaggggctccatccggtccccagtgggctaaacatgctagattcagctatggctactgtccacacagcacagcctggactatatgtcccaaacaaaactaacaaactaaaagaaaaaattcatttgtgtgattaatatacattagtagaaaaagtcctgccaggcaggactgtctgagggcctggggtggggattccaggaataaagccttccgggctcctcacctttcccactccccttcccaaagtaaagaggaggggaggtctgcagtgtgggccatagatagaagttgcctggcaggctttaaggctctggctcccacctgcaaaaagaaactttgtttaaaaagtcagtttaggaatgtcagggtaggcagcgctggggactgtggtcatctgctgcctcctgctggccacagcatgaatttctgtcttggagcacgaatacccaagtcctgctcactggtgaagaaggccttgagaccttccacagctttgtgtttttagtgcccagttctccatccttgtgcaggcccctgactagccaatgtgaacacagagacgggggtacgggttagaatgtgaggccacagaaggtctaaagttaccagagagcgagtgaacgccacctggttttgctgggtatgcacagagagcctgcaggatggctctaagagccaggaggggcaggcggttgtcatcccaggcaggctaagtggtcaccccctcccccccaatgctggccatgttccctgcaggacgcacatgcaaaacatcaaagacatcaccagcaacatccacttcgaagcctaccgagtgaaacgcctcaacgagggcaacagcgccatggccaacgggatcgagaaggagccggaagcccaggagatgtagaatgcgtcccgcccctggaccccacccccagatcttttcatcatccctggcccacccacctaccctgtcttattttatataattatctccttgtcacctgcctccatccatctcttcccacactttgccaggtaacaagagagggtttacctcccaagtgtgctcttattggctgcagcagcagggtgggcggggctaagcctgggcttgcctctgtgctctatttccacccgggctcagcccctgaggggttagaagagctatgtgtccgtcccccgctctgagttctaagctgaagcctgtgggggccaagtcctagggggtgcagaggagcccgttagaccacaagaccccatggccgcagcctcaagcaggttagagactgccccaaaggaggatggagctggccgggtattcctgaaacctcacctgcccctccgggggcgtttcttacagcgccctcagctgcctgcccctcaagggaactagaggcgtcacagccaaagttgccaatcacttagacaaagtgacaaccgtgcccctcgagcttgtcccagagcagaaagtgccttgatctacaagagccagtcacctcttcccagatgtccctttgggtgaaaagcagggacgtgctggagagagggaggtatcttttctccctcgcccttgggttctctctcccctgtgctgtagatatcgctactacactgggctttaattataaaagacgaagcgtgaaagatgctccccgatgttaggaagccccgcccccaatgtaaggaaggtcaaagcaagaagatgagtcgaagccatgagggaggaagccgtggaagggaggcataagagtgtgtgggagctctcctgcccaggtgccgcggaaggcatatccgcgtggtcctcagtttgggccaagatattctggttacattgatgctccgctgcctcaccctgtcccaccccacacaccccaggctcaagccttgatgattcagtgactgtactgggtgggagccagaaacctgaccattttgttgtctacatgagcctagactagccctgtgccccagaacccatcaaaaatacccctaaagagggaaagatgagggggtcagagatggatagccaggctcactcatcttctctcagagggaacattagggaccatccatgcacagctgaccaaagccgtgtccttcctgcctgcctcccattctcatttgcccctgaggagaaagtttggtgaggtgcgttaggttggacccgcttggggaaggtgcctctacagacccagggctagctttctgcagcccagaagtgcagtgggaggggtggggtgcagacagatggagacgaacattgtttcctgctttgggcgtctactccctcatccaagcatggaagggcccctcgtcatgccctgtggccgaacagttcgcttgccagcttgccaagttcttttgccaaaatcaggactttgaaggaaatctccagcacgctggacccagggcactccggccttcaccagcccaagtgaccctggggatttagcagcaacccggtcatcaggatgactttgtgcctctgtaaccaggtattgaaactgttcgtctcaccaggccggtccacgtggccctctgctgggggcttcctggtgggggggcagaaaagtctctctctctctctctctctctcttttttttttttttgtataaataacaaagtgttgaaatgtatttcctgaaataaatgtttcaaatacaaactttttttctggagttctctttggcaagacctgtctggtccattaaaggtggtgaggggagcacgggagtagaggctcccagtggaaggaagctataggactgtgtgagatccagaattaggaatcagcagcccagtggtgaaaagttagccacacccactgcctgtaatccagcttgtgggacatctgacgccctcttctggcctctggtggtacctgcacacatgtggcagacacatatacacataaatacaaatctaaattttattatgtgagaccctggtaactggccatttataataatgttattccaagagaactaaaccatgtgtggtcccaggaggctggctgagccaaccagttttgtgtacaggaatcaggaaaggggagggtccctctctgtgtgctttaatgtccccaagctcctgtggcaagtgactgcaatccagacaccctggaacaatactagtgtacactctcaccattcggaagcccgggaccgagtgttggcatggctccatccccagtcccctgccacccctgctcctggggactgcgttatttcaggtccatgcactttgctcttgagggacactcgtttcagcccaggataatctcatcttgattttaattacatctgtaaagatcctgtgttcaaataaagttttattctaagcttctgtgcaggtgggaatctggggcgatcacctccccacattcccttcctgcgtctcaggggttccagagctacagggacagcatgagagaacaacccgaggctcgtttgcatccaccaagccgagtgagtggtctaaggagtgaccctacctctctggcctgcccacactcttccgaaggccacctgaagacaaacgggcttcatcagccaatgagttgtgctcagcggcctcatggaaccaagcatcaagttgttgattttggctgttgatggcactggtagagggggtctggtccatggaggcagcttgcttgagtcccccagttctaagttccttgacaagtacacctcgaattcctccttcctcaagactgaactgttctctgtgcatcgccagtcccctccagccccaggtgcttaggcagtcgtcagctcattaacctgactggccaccagcccagctcacccgcacctccaagccagtgatgggggaaacctcacctcccactcaagcagacactgtaggaccagagtggccagccgttctcatctgcccaggaacgtgggctttcttgtgcctcctagctagcaatgagggaattctcacctttctactctccacagtaccggggttacaggcatactaagaggaaaaaagttcaggtgctgggacccacattcaggaactcaagcttatgcaatgtgggctccagccctgaatgtaaatgtgggctttccatggaactatcagagctagaaccaaagggaggagggaggggaagctggacaaaggacaaggtggcttcatggtgtgggaccccatgccagtgactttcttccctcctatccaactccagtgtcacatgtagccagctgggacagtggcataattcagaatggactgtcactaaggcaggagcgggaagaccctgcagcaggccctgctcttgatggcttaggcctctatgagatttggggtatcctgcagagtctgaaaatgccaggcatccccccccccattacaggcctcagggtttaaaggcaggaaacagaaagcccctgggagccactggagtgaggcctgctcagtgcagacctctcaggctggtcaaagtctgaagcgcttgctcagagagcaccgtgtgaggctctcttgggttttgtttgcaggtatcccttgtgtgtgtgtgtgtgtgtgtgtgtgtgtgtgtgtgtgtgtgtgtggtgtttgtatgcatctgtgtgcatgtggaggccagaggacaaccttagttgttttgtttatttacttgagacagtctgggctagccggccagcaagccccatgggtctgcccgtttggccactttgctgctggggttatgtgtatgcctccatgcctggctttacccgcttctgaggatcccaacctaaggtcccgtgctcccataacgagcaccttgctgactgagccatctctccactcaaaagatcaaagtttctttatttaatgtgtgtagatgtcttacctacatgtatacaggtgtgtgcctgatgcccgaggaaaccagaagagggggtgggatcgctagggctggagttacagactgccccgtgggcgctgaggatggaaattgagcaactggttaaccacggagccgcctctccatctctgtactcgcggttttttttttttttaaagatttatttattgattatttgtaagtacactatagctgtcttcagacactccagaagagggagtcagatctcgttatggatggttgtgagccaccatgtggttgctgggatttgaactctggaccttcggaagagcagtcgggtgctcttacccactgagccatctcaccagcccctctgtactcgttttaaaacaccactttctggctacaattctagccttatttaatatagaaaatgcagaaaaaattacacaacagagaaatagccccattcacacccagtaatgttgcctatcctgacactggggcacgggcctcagactctggggagcgtggtggtgaccccagcatttgagacaccgaggcaagaatctcaggggtttgaggtcaccatgggtatggctgtgcaccacagcccccaaccctgacccaggcccctgtgtcttctgcccagaaggactcctcagccaggggcttgcccttctatgcctctctctcctctgacctcttggaaggaggggggagggagaaatcttgtccccatcctcacttcattcccctgcctccctcccacccctgcactgtccctttagcccattggggaccagtgtaggattgaggtgcagttcctgagttcaagtggaaattccttccagatgctctgctgcccagagcgcagacaggaggggcctatgtagcagctgagtgcccatgggaaggatgctgtctggccccacaccaatacagggcggcagtcacccaacatccgttgctaggagcccttagagagtcctggtgcagagggttgtctgccttgatgcccagtgggtccatcaggcctgaagaacctctctctatgccgcctccaaacctggtttcctgctgccaagggccacagccggaataagacctataaagtggtgttagtcaggcatgctctgccagcctgccttatgccagcttacgtcatcacccacggcggccaggtacagggcatttccactggggggaggggcaccccatctggtctttctgtctcctggtctttctgtctgtccgtctctcccatattaccacgccgagaaggcctattactctctccttttcccagggaatgtcttgcattagatctgttgcgtgatgtgatctcttaacggtgcgccttgaccctggaccagccaacagtacattttctctaccttatcctaacagtaagaccagaattagaggcatcacacacagactatgtgtgatccctgcactctgcaaatggaagctggaggccagagaaccagagcccagactggctatatacaaaccctgtccatgaaagactaaagtaagacttaataaagaaagatgtaaaataagactcacatcactgataactcatacagtacctgcacactataaaacatttgaacagtaggcatgggaacagcaaatagtgacagtgacttccagttatatgatatatattaaaataaaaaataacatataataaaatataaaaataaaaatgtatgcatgtatgtgtgtgtatgcatgcctgcgtgtaggatgtgtgtgtgtgtgcgtgcctgtatgtagggtgtgtgttgtgcatgcatgactgcatgcatacatgtgtgtgttgcatgcatgcatgcatgtgagtgtatgtactcacggtgcacatggagagaggacaaaacaggagatcaagagtctctcagtgccctgtgacaggtctctcattgcgcgagaagcttgccattttgattaggctggccggccagtgaacagtcaggatcctcttgtctctgcatccagaagtacaagcagggattccttctagagccaaagacaggaaggaggttctcctcctctctcctgcctgctaaggtttgaatgtgaaatgtctctcacgggtttctgtgttggaacacttgttctccagcaggtggcgctgttctgggaggttatggtgcctttggatgtggagagggtgaggcttgaggtgcaggctggcccttcttcctgatctatagagattcaaggaagctgcagcacaagccttcctaccacactgggcagtatctccatcaactacaagccataaaaacaaaacaaataaaaatcctcccttaagtctcttctatcagatatttggcaacaatgataaaataactgtaattctttgtgcttcctctgctcctgtccagccttcccttcctggcttagggatagccagagcctcctactgagtgagcgcctgcgtgctgacagtgaattttaggtcagaggtgtgatggttagtcctcattgtcaactggatttgggaccacctaggacacagatgtgtttataagcacatttctaggatgtggacagcgccaccccatggactggcgtccttgagtgaattaaaaagaaaaggaaaactggtgagcccttccaaggaccagcatgcattgctccacttcctgcctgtgagcaccatgtggccagctacctccatctccttccaccatgatagactatcacctctccaaagcgggctgaggtcaaccctcctctcctgagggttcttgcatcacatatttctgtcacagtagcaagataggtagagctgagacacaaaaccaccccagcggtgcccttcctagattgcatacggaagcattcctggaggcacaggttcaagctgggccagtggacaggcggccctcagtagtgccggagggtccctcctatatcaatgtgactcagagggcagagtagaagtggggtgtctctttctgctgtgtggccttagacaagctctgttccaccaacagggacatggccactaaggcattgtttgatgccaatgaggaaggagggaactctgtgtttcattgctgtgataaagagtccaaggaaaacagctttgaggaggaaagatggattttggctcagaggttggaggtgtcaagccacaagcccgtagcaggacagattctgcactaagcctagggccacctggaccttgcatcgactcaccaggttcaggtctctccctatcacaatgtcaccctttcttcagccatggcaggtgggccttcttagcatccgtggagcctgagcatgtgtgttcgtgtgtccaatccagggctttcccttacatactggagaggcacagcagcactgtcctgctctgcaggatcagatggacccagatcacatctgaaacacagtttcctagggcaccgggacttcaccaccatttgctagtgggatctttctgcacccagcgcagctcctgagcacctgggatgccactgggactcatgcaagttgtcactgaatgagcaccgagcgctctgcggaaagatcatcttcctttcctttcgtataaggtgcttataaagaatctgaagaaaatagggcatgaataattaaggctgcccagagcaaagggatcttgatctgtctgcttgaattaaaaaaccatcactcggaggggcctggatgccagagagcatctgtaagatgtctttacccacagtgccactgcctgctcttccccctttcactccctccctcttcctccccttcttcctgtctctcctggacaccaaggacatcagctcttcagacagccctgccacccagactatcaccatggcctcttctctctccctggttaataccttcatcctaggcccaaagagaaacggcttgacctctgtagaagggtccttttgtgggagacggggtccaggctgggatgctcaggagtcccagaagcacagtcacctgtccagccaaggtgggcaaggctcagaactagggtttgtacctctgtcatggacttggggcttggggacaggcctgtcactgacttttgcctctgcctctttttacagagttgtggctgaatctgtaggatttcttgtccttgggatggcagctgccagggggttcaggggaggctgggtacggggacgtaggatctgtttgtctgtctagtttgccatgctggggggtggggggtggatctgcggcctttgcaatatatggtaggcaagtgctctcccctgagcaacagcccagcctctcgagctcttcagatgtttctatccctgttgaaatccccatctgttcacatgaagacctgtcctctcctcactgttcccccaataggtcttttcacgtatttttagttacttcagtgagctaggaccttgtctgttacagtttgaatgtgattgtgccacaggcccctgtgcttagtcccctgctggaacaggagtctgggggttgtggaacgcttagaaggtggagctagccgcaggagtggccacagctcttactctgagctctctgatcagctccatatagcagctgtcccctcaccctggccaccaggagccacgagcagccatgtcttccccaccatgaccgacttattatttatttatattatgtagccctggttgtcctggaactctccgtagatcaggctgtcctcgaactcacagagatcctcttgcttcagtctcctgcgcgctgggatgaaagctatgtgccccccactgctatggcagacttcttaaactgagtcaaaagaaccttccctcctttcagttccttctgctgggtattgtattgcagcaatgaaaagggaaattaacgttgacaaataacccccacattcctacctcatgatctcatgatcttgttttcttgctttttggcatatcctgcaacttattcctctgtccccaaatcatgccttttaaaaaaaaagtcaaaaaatggaaaataagcctctctccctgaagttagtgtggaggagagaaatggatgttgccagaaactctgacgtgggtagaatgttcttatacgcggggctgtgtcagaagcttggaggtgtggtgctgtggatgaaaacagccccagtggctcatatatttaaatgtttggttcacagttggtgggactgtttgggaaggcttaggaggcgtggccttgttggaggaggtgtgtcatggagggtgggctttgaggttttaaatcctatgatacttcccgtttnnnnnnnnnnnnnnnnnnnnnnnnnnnnnnnnnnnnnnnnnnnnnnnnnnnnnnnnnnnnnnnnnnnnnnnnnnnnnnnnnnnnnnnnnnnnnnnnnnnnnnnnnnnnnnnnnnnnnnnnnnnnnnnnnnnnnnnnnnnnnnnnnnnnnnnnnnnnnnnnnnnnnnnnnnnnnnnnnnnnnnnnnnnnnnnnnnnnnnnnnnnnnnnnnnnnnccctccctccctccctcccctctgactcctgctgcttcaggtatcagttctccctgctgctccagcaccatgcctgcctgcctcctgccatgccccccaccatgagagccacagactcgccctctgaaactgtaaagcaagcttccaaataaatgctctattctataagtccccttggtcatggtgtctctccacagcaacagaacagtgactgacacagaggatgtgatcgtggctcccggaagctggtgtagccacacaggtaccgttgctgtagagagatggtatgacctcctgacatgccagatgttacagatgtgaactgtgaaattcacactagggtcatcctgttcacacttactgtctgcctgaatgaccttaagatgaccttgaaaatccccccccccctccccaagtccactggctgcaagggactgctgatcttgtgagttcaagatacatcaaaatcccagccagccagcatccacctgggctggcaggctccacagctcccctggagactccataggattcactaccagaaacctggccctgatctctgtgtcttggcctccattgtaataggggcctccgttgactccctgcccagattcctccagaatgttctggcttttgtcagttcaaggctggccctggcagccgtggaagcagggagtgtgtgtctaataaagtcagcgctctgtaatttagcaattactgaaacccacacttgtaatttagggggtttcttgtaattctttgtagtctttatctctctttgaacaaatgtgcagcttaatagcttcctccatcctgttccaagggttggtatttgccacccctcccccactcagctccagttcatgaaagtgtctagattgtgtggaagccactttccagaatccaaaaggttaatttaaaggccagccttccccccaaccccagtgctggctcctgacagtcaagcagtatctccagggccccgagtttggcactccagctgttggttgggtagatggcgtgatccaccttcggcagggtctgtggttgggccattcccattgctgacctctgaccctttgctcaagcagttactaaatactttggttttgagactccgttgggaatcagagccatcaaggacgggctggacctctctctccagaggccttcagtctagtgagaaaaggatggctggctgtctaggacgtcacaggtcccaaccgagctggcacccgggaccatggcagccaagggaaccaccctgtcagaatgagctgtaagaggagggaatgggagtctggtgcggaggaggaagagggacaaagcctgaggaggagccctacagagggcacccagtttttagaaactgtatttgaaacagctttgggtcgaggatgtggctcagttggtagagtccgtgcctgagagtcttgacttggttcccagtgttccgtgagtgtgacaacacatgcctgcagccccagcacatgcctgcagccccggcacatgcctgcagccccggcacatgcctgtagccccagcacatgcctgcagccccagcacatgcctgtagccccagcacatgcaagttgcagatggtctgtcctctggaatcataaaccaagtttgagacctccttaaattgcctttggtcattgttggaaacaaaaaacagggggtgggggccagtggggcggggggagaagtgggggaggaaaaggggtctaacatccggccagagttcctgtgctctgggcaggcagacacaggcagagctgctggacacttttccattcggtcccgggtgagcatgcctgacccacgcagcagggggtggaaaaggggcagctcctgactggggatcccaagctaccttgctaaagccccagggctgtaggagagagggaatagggaaggagttcccaacactggcaagagagtgcacagcggatctagatggaacagagactctcaatagtttaaaagctttattatagaaattcaggggaaagagagaagatagagagagagagagaaaggctagagagaaagagagagagagaaagagagaaagagagagaggagaagacaaagagaaagggaagaggagagagaagtgagaggtaagggaacaaaggagtaagagagtgaggtgggggcctaacagccctttttatggtcttcactgttgctaggtaactgaggaggagtttggcctgaaggtcagaagcttgggccattgcttatgtgactactgaccatgctggatcaagtgtttttggtccctgagacatctccctgacctggaatgagggatccacttgcctctgcttaccaggccagatgccttgcttgaa

SEQ ID NO: 260 - DNA, 2942 bp, Mus musculus
aattcggcacgaggcgccagaacacaaccggagtccctgaggctccagaacagagtcagggtgagccagccccagcccagccccaggttctggcttcctctcttgcttctccctcctttggttgcagccagcagagcccacttaaactccgaggtgactcccagctgtgttggcgacatggctgacaaccctagagatgccatgctcaagcaggcccccgcgtcacggaacgaaaaggcccccatggagttcggctatgtggggatcgactccatcctggagcagatgcgcaggaaggctatgaaacagggcttcgagtttaacatcatggtggttgggcagagcggcctcgggaagtccactttaatcaataccctcttcaagtccaaaatcagccggaagtcggtgcagcccacctcggaggaacgcatccccaagacgatcgaaatcaagtcgatcacccacgatattgaagagaagggggttcgaatgaagctgacagtgattgacacgccgggcttcggagaccacatcaacaatgagaactgctggcagcccattatgaagttcatcaatgaccaatatgagaagtacctgcaggaggaagtcaacatcaaccggaagaagcgcattcccgacacccgtgtccactgctgcctctacttcatcccagccaccggccactcgctcaggcccctggacattgaattcatgaagcgcctaagcaaagtggtgaacattgtcccagtcatcgccaaggctgacacgctgaccctggaggagagggtctacttcaaacagcggatcactgcagacctgctgtccaacggcattgacgtgtacccgcagaaggagtttgatgaggacgcagaagaccggctggtgaacgaaaagttccgggagatgatcccatttgctgtggtgggcagcgaccatgagtatcaagtcaatggcaagaggattctgggaaggaagaccaagtggggcactatcgaagttgagaataccactcactgtgaatttgcttacctgcgggatctccttatcaggacgcacatgcaaaacatcaaagacatcaccagcaacatccacttcgaagcctaccgagtgaaacgcctcaacgagggcaacagcgccatggccaacgggatcgagaaggagccggaagcccaggagatgtagatgcgtcccgcccctggaccccacccccagatcttttcatcatccctggcccacccacctaccctgtcttattttatataattatctccttgtcacctgcctccatccatctcttcccacactttgccaggtaacaagagagggtttacctcccaagtgtgctcttattggctgcagcagcagggtgggcggggctaagcctgggcttgcctctgtgctctatttccacccgggctcagcccctgaggggttagaagagctatgtgtccgtcccccgctctgagttctaagctgaagcctgtgggggccaagtcctagggggtgcagaggagcccgttagaccacaagaccccatggccgcagcctcaagcaggttagagactgccccaaaggaggatggagctggccgggtattcctgaaacctcacctgcccctccgggggcgtttcttacagcgccctcagctgcctgcccctcaagggaactagaggcgtcacagccaaagttgccaatcacttagacaaagtgacaaccgtgcccctcgagcttgtcccagagcagaaagtgccttgatctacaagagccagtcacctcttcccagatgtccctttgggtgaaaagcagggacgtgctggagagagggaggtatcttttctccctcgcccttgggttctctctcccctgtgctgtagatatcgctactacactgggctttaattataaaagacgaagcgtgaaagatgctccccgatgttaggaagccccgcccccaatgtaaggaaggtcaaagcaagaagatgagtcgaagccatgagggaggaagccgtggaagggaggcataagagtgtgtgggagctctcctgcccaggtgccgcggaaggcatatccgcgtggtcctcagtttgggccaagatattctggttacattgatgctccgctgcctcaccctgtcccaccccacacaccccaggctcaagccttgatgattcagtgactgtactgggtgggagccagaaacctgaccattttgttgtctacatgagcctagactagccctgtgccccagaacccatcaaaaatacccctaaagagggaaagatgagggggtcagagatggatagccaggctcactcatcttctctcagagggaacattagggaccatccatgcacagctgaccaaagccgtgtccttcctgcctgcctcccattctcatttgcccctgaggagaaagtttggtgaggtgcgttaggttggacccgcttggggaaggtgcctctacagacccagggctagctttctgcagcccagaagtgcagtgggaggggtggggtgcagacagatggagacgaacattgtttcctgctttgggcgtctactccctcatccaagcatggaagggcccctcgtcatgccctgtggccgaacagttcgcttgccagcttgccaagttctttgccaaaatcaggactttgaaggaaatctccagcacgctggacccagggcactccggccttcaccagcccaagtgaccctggggatttagcagcaacccggtcatcaggatgactttgtgcctctgtaaccaggtattgaaactgttcgtctcaccaggccggtccacgtggccctctgctgggggcttcctggtgggggggcagaaaagtctctctctctctctctctctctttttttttttgtataaataacaaagtgtctgaaatgtatttcctgaaataaatgtttcaaatctcgtgccg

SEQ ID NO: 261 - DNA, 1005 bp, Mus musculus
atggctgacaaccctagagatgccatgctcaagcaggcccccgcgtcacggaacgaaaaggcccccatggagttcggctatgtggggatcgactccatcctggagcagatgcgcaggaaggctatgaaacagggcttcgagtttaacatcatggtggttgggcagagcggcctcgggaagtccactttaatcaataccctcttcaagtccaaaatcagccggaagtcggtgcagcccacctcggaggaacgcatccccaagacgatcgaaatcaagtcgatcacccacgatattgaagagaagggggttcgaatgaagctgacagtgattgacacgccgggcttcggagaccacatcaacaatgagaactgctggcagcccattatgaagttcatcaatgaccaatatgagaagtacctgcaggaggaagtcaacatcaaccggaagaagcgcattcccgacacccgtgtccactgctgcctctacttcatcccagccaccggccactcgctcaggcccctggacattgaattcatgaagcgcctaagcaaagtggtgaacattgtcccagtcatcgccaaggctgacacgctgaccctggaggagagggtctacttcaaacagcggatcactgcagacctgctgtccaacggcattgacgtgtacccgcagaaggagtttgatgaggacgcagaagaccggctggtgaacgaaaagttccgggagatgatcccatttgctgtggtgggcagcgaccatgagtatcaagtcaatggcaagaggattctgggaaggaagaccaagtggggcactatcgaagttgagaataccactcactgtgaatttgcttacctgcgggatctccttatcaggacgcacatgcaaaacatcaaagacatcaccagcaacatccacttcgaagcctaccgagtgaaacgcctcaacgagggcaacagcgccatggccaacgggatcgagaaggagccggaagcccaggagatgtag

SEQ ID NO: 262 - DNA, 96595 bp, Homo sapiens
  misc_feature (47135)..(47940): "n" at positions 47135 through 47940 can be any base.
tcccagcccagcttctctgtagatccacatctggccaatctcctatgtctgggactcttgccctccccagaaggacgaaggctcttctcgaggttgtgtttgggactgggccagggatgacatttctggcaaaagcttaaatgacaccatgatcaacgctttggtcagctcacacactttctttccttttaaaaaaaaaatggaattcttagagctacaaaacaaaaatgtaaagaataaggtaataaaacacctgtgtactcaccatcccgcttaagaagtgagacattgcaggtgtagccgcagccctgggtgaccctctccatcctagccccactcctgctgcggtgcccgcccctctggattgggatctggccccgggcaggcacatctgtgctgggcagtggtgtgtctgagaagcctaggtctccttttttttttttttgagatagagtctcgctctatcgcccaggctggagtgcagtggcaccatctcggctcactgcaacctctgcctcctgggttcaagcgattcttctgcctcagcctcctcagtagccaggattacaggcacccgccaccatgtctggctaattttttttgtatttttagtagacacagggtttcaccatgttggtcaggctggtctcatacccctgacctcaggtgatccacctgccttggcctcccaaagtgctgggattataggtgtgagccaccgcatccggcctggtctcctcttgcatacggtcatcagcatcgtgtgactgagcagcctaggtctgtctcctcttgaatgccgtcatcagcatcacatccttggtgcctcactggagtcagtggctgccctgcctgtgcccacaacgtgacggcgtggagacttatccatgtagatccacgaagccttggttcacttattttggcagctagcgagtgttcctctgtgtggggaggcagagtttgcccgtcccgtggcccactggtgacatcgccgaaggtcttctctgttactagtgctgccgggaacgtgtgtttccccaggtggatttggctgggctgtggagatgcgcttctcagcccttctagatgttaccaccacgccctcccgagtggccttctggtaggctctcccatgttcgctcattttctgtgcctcaggcagccgcctctctgactgagcgtccagctgacttttgccctgtttcccacggtgcacggagcatttcatctcagtggtgcctgagcttccctccctctggccctcagaccccggctgggatccttggagccaactcctctgcctgacatcccgtgtcgctaggtcctgctcttccatcttccaatacctctggggtgtgtggccttttccccagtgcccccatcatcccttctgtcctaggttgaaccgtgtcccccacaaactcatgtccaccaaaaacctcagaatgtgacctgggagttggagatggggtctttgcagatgtaagtagttaaggatcttgagatgaggtcattctggattagggtgggccctaaatccaacaactggtgtccttaaaagaagcagagaggccacagacacaccggggagagccacgtgaaggcaggagcagatgatggagtgacgcagccccaggccagggagcgtctgggaagaggcaaggaaggaccccccccccaccccaccccagagcctccctagggagtgtggccttgctgacaccttgattttggacctctggcctccagcatgggagagaacccgcttccattttttcaagccccacagctgtggtccattatggcagccacaggacactgatgcacctcccacctggccgctgtggatggacgaccccgcccgcaggaagtctccctcaagcactgcaggtgtctctgccctcacaggggacgcctgcacaagtaggtgtgaaaaaagggccctgtgggggcagggcctgggctggtgctcgctgcctcccttcatcctatgctagttcccatgcctcttccggcaggagtgcctggctccacctggtgaatcagagccaaactctcctgacaattggctgtcacttatttaactgccaccatccccaggagacagaaaatgccagaagggtggggcctgtgcagtgcctcctcgctatttccccagggcaccgtgccacgttgcctcaatgcacagagtagctgctcaaagtgtgtcggacgaacaggtgccccatgcccagccatgcagacaaaagtgtgccacgtggagggagctggtcgtggaagagaccaccagcatcttggctgcccgaggaccttgcccctgggctcttgcaggcacccctagttcattacttcctctctcacccatagctacccgctcttcctctatttctctgatatcagccttgccacccacccaggtttgcaagcaggaaatctcagagttgaccttgacctctgcctccccagcacccccaggtctcaacaggctgccaagatctcatcaactcgccctctgcatactgacccttggacaggctgccccggtcacggtcatgtcttggttgggcctccatcatccctccttggaccagcaggtgccatcctccccacccctgccctgctgtggctccttcccctccacggccaacatttagaggacgattaccacttccctccctgtgtgctggggaccgggtgataggatccctccacccgatcatttccattagacctgggccgggtcttcttactcacagagcccttagtttccgcccccaaagcctcgagggtggattcgtgctgccgcccagcctggccctgataccgctttccagcctggagccccctgcttctgcgctcctggctctgagtgctcgggccccccctggatgggttgccacttgtcctctggaaagcagggcttccatgctcctggacctcctagctgactcaggtgactttgggccatcttgtcacaccccttctatcagcttggccttggttatttctgtgtcctccatagcctcggaccagagccacggcgggatgctttcctggtgcgtggcaggcagtcaggaaatattgctggactgaccttgataggagatgcttgggagaattgcccaaaaaactagcttaaaatgcaaatattggccttcttttgcgttggctaaagagtagcatttctccgtttgcctcccgggtaagaaattgatggcgaatgcaatgtctctagggaggagaagaaggtgacaaaaagggtctgtataacggggcacacgctaggcatttgtgactatttaagtttaaattataacataaatgcgaaactctttgccttggtagcccttccacattgcaagcgttcactgccacatgtggctgccatattgactacggcagatacagaacattgacatcattgcggagagttctatgggggggcgctggtttagatcatcttcacgttggatccacaaattcattgtttatccagtgaacggttactgggcacctactgagcaagcaggatgaaagacacccgctctcgggggagtcttccgttggctgcagagaagcttaaactcaggggacctggggcaaactctgcaagggcccttggcctctgcacccccagacctccctcgctctgcaggggcagtcgggggccccctctaggaatggagcgccagctccagctcctgtcaggctacagcccagatggttggctgagcacgagcatgtgagagtggaattgggcccaaccgggctgcttctccccgttgtcttggtttccttccacgctgacctggaaggactcctaaagcaacaggcctgcccaggcggtttgcaccagtaaaccctgcagcggccccaagggcagagatagctggattgtatttatttaggaacagccaaagtctgaggcacaataaaaagtggagaaagattccagagaggaatgcagctggcctcagcctgggaatccgtcttgcttgggaggctgtaggcgggccaggctggggccagcctggagggtcttggctggctctgctggcaggtacagtagcagggtcagcaggagggagtccaggacggagctccttcatttttaattcagggaagcaaacttcagtggttgagtctgaggatgagcaggaaatgaatggaaaagtcttttttttttcttttttctttctaggcagggtctttctctgtcccccaggctggagtgcagtggcacaattatagctcactgcagcctcaacctgccaggctcaagggatcctcctgccttagcctcctaagtagctgggactacagttgtgcgccaccatgactggctaattcttaaaagaaatgttttcaggctaggcatggtgacccatgcctgtaatcccagtacttttggagccgaggtgggaggatcacttgagctcaggtgctccagaccagcctgggcaacatgacgagaccccgtcttgactaaaaatacaaaaagttagctgggcgtggtggtacagccctgtagttccagctacccgggaagctgaggctgcagtgagttgtgatcacgtcactgtcctccagcctgggcaaagggagtaaggccctgtttcaaaaaaaaaaattttttttttttttgaggtggagtcttgctctgttgcccaggctggagtgcagtggcatgatcttggctcactgcaatctctgcctcccaggttcaagtgattctcctgcctcagcctcccaagtagctgggattacaggcatgagccactgtgcctggacttttttttttttttttttttttgtagagatgggatttctctatgttgcccaggctggtcttgaactcttggcctcaagtgatcctcccactttggcctcccaaagtgttggaattacaggtgtgagccaccacacccagcaggaaaagtcactttttaaagcgagaggttgtgcgtcctctatagcttggcgctcatcagcatggaggatttactggaacgtgtgttaggtgaggggacatggaagatggcagcaaatccgagcccagagcatcagaaagcatgctttcagccaaagatgcgttctctccacctccgcgcagcacccttccccagtgtgtactcctggagcaaggtggggccgatcctacgaagaccctttcccgaaggcccctgctgcccacatcagtgtcacctggaccgcctgctcccttttctggatggctggaccagccccagggcctcctggcctggtgtggggagcacagtccaccctggggaatgcctggtatgtgtcccctccccactgggtaccaggggatgaagctgtgcttcgtggaaggggacagaggcgctggtgcccaggatggtgcacctggggcggctgaactggacctggcccctactgggcccctgtggagcccagattgttgtgagaaggggtggggaaaggcaggtgatccgcacctttcacttttgtttcacatgggaacaggggcttatcctgcacacatattcagtttggagtatgaatttccatgaagaggaaaatctctattaggctctgatgtcaggattgtccgtgagggccgggccgtgttctggggcaaggacaggagtggagggggcaaccagggaaggcttcctaatggaggaggcatttgatagcatcttgaaaaagaagcagttcctaggccaagccagagactgaagaatgaccacctaacttcttttttttttttttgagatggaatctcgcgctgtcgcccaggctggagtgcagtggcgtgatctaggctcactgcaacctccacctcccaggttcaagcaattctcctgcctcagccttctgaatagctgggattacaggcatgcgccaccatgcccagctaatttttgtatttttagtagagacggggtttcaccatgttggtcaggctggtctggaacccctgaccttgtgatccacctgcctcggcctcccaaagtgctgggattacaggcatgagccactgcacccggccacgaccacctaacttctttctacaagatgccccctggctgacgcaaagcaggttgagtgagtgtgacacttccttcctgtctgtgggttccggcctttccagagcccggccagtgctattggagacaaagtggccttcgctcttccttcccgccctgccaggcccagcctgtgccgctgagccccactttgcaattaagaggagctgtgaaccagtgatgctgatgtcgcagaaaagtggccaggggtctatggggggtgaaggacagggatgccgccctgagaactgtctggaaggggcttttgggtaacagtgcccactccagggtgtgggcaggctggggtggctgggagctgggctcataggctggcacaaccagagtttcccaaagccgtgggcctgagggccctgccttcctgggacagcaacctttggtccaatttgggaaaaggtgggttaaaccaagcccggctccctcactgtaggattactcagtgcgtttagtatgcaaatgtgcctctgaatctaagacaggaccacagaaacctcttcagtgttcctctggagggagggaccgcgggggatccaccgcaggggcctgggtctgcactggcctggtgaagtgcccccttagtgcttacaccatgcgcggtgagaggttggccctcgcctcccccaccctctgctggccttacctcaccacctctgcactcgcctcccagccggctcatgactaactcctgcctcttcagagccaatcggtgctgccaggttttccatttcaagtgatcccccgcctgggccaaaatgtttggattttcaggcacggaggggagatggacctcaggccaaaccatgctgggtaaaactgagggtcaaggctgtgctcagcaagtgctccagccctggccgtcaaacccatagtgtgcacagcgtgcaggaggtggctgggtgaatgaactcagtcatagcccggcccctcactcggggctgttcccaagttcccaccgccagccaggctgggtcagagcctcgtggggccttcctgggcttccctgccccacagcaggagttcgtatggagagtctcgagtgaggttaatgggttttcttcctcttctttttttttttttttaatttgagacagggtctcactctttttacccagccagggtgcagtagtgcaattatagctcacagcagcctcgaactcctggcttcaagcaatccttccgccgcagcctcccaaagtgctgagattacaggcacgtgccaccttgcccagctggggtttctgctttttactttttctcttgtttctaaactcaatacaaagaaagatattacatttataatcagaaaaaccaacaaggaatattatttcaaaattggaaaagggattaaagaaacaaaccaagaaacctctgcgattcctgcccatcggagtcagtggttgttagtggttggcttaacacaatgttttaggaagaaatagaataacagaaagcaactccagtgagctgagccctggctccgtctgtggcgctgcatcagtttcctgcagctgctgtaacgagtggccacaagctggctgggtcacaacaacgcccagccatcctctcacagctctgcaggccacacatccgagatcagggtcaccaggctgaaatcagggtgtccactgggcatagccctctggaggctctagggcaggggttcccagccccgtgtgtcctattaggaactggcctgcacagcaggaggtgagtgactggcaagcgagcgaagcttcatctgtatttacagtcactccccattgctcgcattactgcccaagctctgcctcctgtctgatcagccatggcattggattcttataggagagtgaaccgtattgtgaacggcacatgtgagggatctaggttgcgtgcttcttatgagaatctgatgcctgatgatctgtcaccgtctcccatcaccaccagatgggaccgtctggttgcaggaaaataagctcagggctccaactgattctacattatggtgagttgtataattatctcattatatattataataataatagaaataaagtgcacaatcaatacaacgtgcttgtggccgggtgcagtggctcacacctgtaatcccagagtgaaactctgtctcaaaaaataaaaaataaaggccaggcacagtggcttatgcctgtaatcccagcactttgggaggccaaggctggcggatcacgaggtcaggagttcaagatcagcctggccaatatggtgaaaccccgtttctactaaaaatacaaaaattagccggacacggtggcaggcgtctgtagtcccagcttcttgggaggctgaggcagaagaattgcttgaacccaggtggcggaggttgcagtgaactgagatagtgccactgtactccagcctgggtggcagagcgagactctgtctcaataaaataaaataaaataaaataataaatataatacacttgaatcatctcaaaaccatctccccactccctggtctgtggaaaaattgtcttccctgaaaccgatcccaggtgccaaaaaggttgggggccactgccttcatcgcctgcccctttgagcctctggtggctgtgggtgtcccttggcttgtggctgcatggcccttaccttcaacaccagcatctacagatctctccgggccccatctccacttggccatccctgtctgtgtcaaatctccctctgcccccgtcttgtatgagcaccgagactgcctttagggaccacctagaccatccagggtgctctcgccacagcaagatctgcaactgaatcacagatgcaaaaactcttgttccaaacaaggtcccatttgcaggtctagggattaggacatgctatccctggggccattattcagccttctctcgtgactatgatccctcccttcctccccagcctcccacctcggctgagatgctgtccccacctccctcactgtctggctgcctgtggggctgtcctccaggctctttgggaggaggtggttgcttgatgtctcccagaaggctgggaatggtcctccccaccccccaggaagatgtcctttctgccaaggagattgcatttggggtcctatcccaggcagagagcggacgggactgtggcctgaagtggcacttcagggcctttggctctgtcatctagccgagggctgtgcatgggcctcacctggtcacaggtaactcacctggctctgtggggcagggattgtaaactcagaggcctgcggggtgtgtcgaggtagaggggtgcaaatattgtaaatttgttgggggccttggggagcagcacagactgaaaagtgttttgtctgaagagcagaactgtcttataccagccctgtgcggccaggcaggaaggcttccgtggtgcggccacgcgtcctccctttctcaacagaagctgacagtctggagttttcagagagattgcctgagttctcagccttggcacaaacacacattctctttaaacaggcttgggccaacagaaccagcctccgtgtctcgggtttgaatgaacccttgaggtgaagcttaaagacagagaggatgcccctgatccccaccccagggacccacattgtaaacccccacctgctctgctgagcccttggcctcagcatggaccctgaccatgtgctggtggggaccccccaggtaagtaagcagcctctgaggaccccggatgaacagtggggaacagcactgatcccccagtggggccccgagttcccggagaggaagactcgctccctcccaggggacggctagagactcactgactcatgcgtgtgtggtaggaatcttccaggaagtccccgtcccgttcgccctctctgcctgggcggggacggcaactgcctctgtcactgcagactaatgggacggaggggggtgacttctcagggttcctcctgggcaggtgctccggaaccttttctcagcacgctggcctggggcacggccgttcctcctgcccagccacgttggggtacagggtgaagaagggctggggccagcccaggacagaggaaggcgaggcaggcacgcaggaactgggctttttaaacccttaagcccaaggaaatcgtagcatcgcgggacagggaaaatgaaagactttggaagtcgtcaggaatttgactctgtgagttggtttccaagagtctaagttaagcatctccaagtggatattaaaaaggagcagcaagcctcggggcggcgggggctggaggaggtggagagaggaggctgccggaagccgcactcgggacctctgcagccaccgaccagaccgggcggccgggactctgggactctcgcaggcagacccggtggtctgccggactcctcggggcccacttcgggccctctctcctgcctcctatttttggatttctctcctttgctccctttttcctcccgttttgaagagacaatgctacttcagtttggagcacaaacatatgatcagcacatggaaatgtggtaattcggatgcattcgtgattgcaacagattgaagaaattagaccagacaaagagtgtttttagaggaggaggaggaggaggaggaggctgagagagggagggcgacgggggtgagaaaggggaggccgcctctgagcgggacgccgggactcccgccgctgctaaatatatccgtaggaatggagagggaccggatctcaggtacgcagacagccccctccccatcggccgccccccactgccctggactcggggctttatttatgcctgggggaataagcatgcaaagggcgcttttgctcatttttcacagaaatatttcttttctttttgacggttccaagctcgtgggatgaactccgtctcagaagctaagctctcctgagtctggcttttatttaaactcggctctcctctctcctggctacttccctttcattttccagtgtgccattcttgcatgtcatggccactgtcaatgctgaggctgttggcgccgaaaccttgggagggtgtgggggacctgcccccctggctcgggtctggggcggcggcgcttggacctggctggtggttggtttgtccactgtgtggtttgttttttgcttccagccaaagtctgtcttcaaggctgcctcggtctcctacctaaaatagcatttctgtgccttcctggcagttgattatagagggggaagctcccggcgctcagaggagcctggcgtgtgtgtgcacgtgtgtgtgcatgtgtgtgcgtgtgtccattcacgctggcagcccccttgccgcaggcacagacccatcagggcgtgaacaggcaaatgaagagaaagggggctcccctgcctttagttcaccccagctttccaggccctccctcccaggcccagcctccttggtcccttcactcacatgcggtgccgtggctgccatctcacgtggccagcgccgtcatcggtaattagcagtgatgacagtttctgccgctcatgccgccctctgagcccagcgctgggagacatggggtggctgagccaagctccaggctttgggtattctgaagtgacctacgggccatggagcgggaggtcgctaagagtgtcaacccctacgtgccttgggccctggtctgttggttgccactatgtgtgtgttggggggtccctgagaggcctgagagagggaggcccatctcggtggctcctctctaggacgtgtggtcccctccaccactgctcccagggccacatctttttttttttttttctttgagacggagtctggctctgttgcccaggctggagtgcagtggcgcgatctcagctcactgcaagctccgcctccctagttcatgccattctcctgcctcagcctcccaagcagctgggactataggcgcccgccatatttttttgtatttttagtagagatggggtttcaccgtgtcaaccaggatggtctcgatctcctgatctcgtgatccgcccgcctcagcctcccaaagtgctgggattacaggcgtgagccacggcgcccggcctcagggccacatcttgattgtcacgttgggactggtggagcgggtgtgtgttgtgccgctgagcacacccagtcgggcacagcaggcggacctcaggagggggccaggggagacggcagaaggcttgggtggcagtgaaactgcatcttatctgtttgagctcgggggctcaggcccgctgggacgggtgggtgtggagcccagcgtcctgctctccgcccagcaggagccgcagggcagggagcgctgagagggaccttcgtcaggcttgcacagtggagccgtcctcggagtgaccaccccaccaggcagcctgggcagaccacagtgggtcccctgcctcctgggccaccagccccaggaggacgtcactccacccgcctggctggcaggggcctcggggagcctcgggttcggccttcactttatagatgatctagccgaggcccagatgggtgaccagcaggggatctgagagctgagcagagaggcgtgggtttgggggtggtgctccctggggagctggaagtgatggcaccctcccaggctcacaaaacacgggcttttcatgaactgaacaaaacactctttgaaagcagccagtgctgtgccccagagaccactctgatccctgctgcccttggctgaggacagcacagccagggatgaagcggggacctcccctcgggctgtgccttgatgaaagatgctttctacaaaatcccattcggatgtgttttcatgtaagaaaacgtacatttttagaaactcagttgtaaactggctgccttccgaatgaacacgacagtcccggagctgtttcccttaatgaggttctcgtcctgggcaaactttagcgctggtctttaattgtcactgaactcccgcacagtccctggggaagtgacttccttcctgtccctgctgggtggccttgagcaagccacttggcagctctgggccgcagttccgtcatctgcaaggtgaggggtgggagcggcacggcccctaggcagcgcccccacctcctgcgggtttctgcgcgtgtcctgagttttgtgggcgcctcttccctcactgaggggctcttcttctctgcagggcatggctcacgccgcgttgtcaggctgcaagccactgcgagagctgctctgatccccaagcatgctctggcctgaggaggagccatggggaggacgctgtgcctgtgtgacagaggcctgcccggcagatgccggcccgctgacttccagacgtggctgtgggtgcctcatgccccactgggctggcgtgtgaggcgtgtccagctcaggctgccctacagctgcccaggaagggtttgtgggagggggtggtcctaccctggtgagtccacggtggtctgccagccccagggaaggcttaggagccccaagacctgccctcttgtccctccctcggcagtgtctggctccggtctggtttgtgaacgggggcctgggtactctcccgccctccctgggggctgtggccttcccctgggaaggtgctggagggtttgtcagcagggccggcatgagtcatggagtggtgactggccgctgaggcatggaaggccactccttccagccaagggtcggagctttttttttgttctggaacggctttgtggcttttacaaattaagcagttttatcttgttccaagagcttgtatttcagcagggagagagtctccaagaagggaactttccactggggagctctgttgggctgggaggctaggaacaggccacgagggagggctgcaggcaggggaagtggccgtctgtgcatggtcatgaatgcaggcccggggtcctggagggggcttggccacgctgtcgctggacgtctgtccccaccagggtccatctgatgcagtacggcacagggtaaagcccagctcctcttacggggttcctgggtcatcagtgggcggggaaccgaggcctcctggagggcggtgcctcagccctcacccctccctcctgtccctcgctgtgctgtccccgatggcctctgccatcccctgggagttcttacccctggacgctcggtgcctgtccggtctcaacctctccagctctgcttttccatctccgaggtgagaggcctggcctgacgcgctctgcacccgcttcctgcccagccccgtgggaactctggtccctgtagtggtttcctggggctgccatcaccaggtgccacaaactgggtggctcaaaacaccagacatttcttctctcgccgttctggaggccagaagtccgaaatcacggcatcagcaggcctggttctttccggaggctccgagggggagcctgcttctcgcctctggcagcttctggcggctcccgaaacccttggcgttccttggctcgtggccacaccactcgacctctgcctccgttgtcacggggcctccttctgtgccctaaatctccccctgtctgtctctcatacggacagtctttctcggatttagggcccactgggtaacccaaaatggtcccatctcaagatccttaacttcataacgtctgcaaagaccctttttccaaataggccatgttcataggctctggggtggatgtaaattttaggggccacctttcatccccctgttgtccccgtgtgtctggatgcacagcatggttccatgtcccagactccttgctggacccctctggccctttggggtggcctttggccttttccactcgtttctgtgctcctggtgaggtgtcggggtcgggcttagcccctgcaggaattctggggacagcatggagccggcaactccccaccaggcgtcttcctacctgcccagagctcatggttgtgaggggtctctccttgtggttttgatttgcaattccccagtggttagtgatgttgagcatcttttcgtgtttattgctcatttgcacatattcttgcagaaatgtctgtccaagtcctttacctgtgtttgatttggatgattgttgttgctgagtgttaggagatctgtagattaatatccagatactaatcccatatctgacctatgatttgctgccattccatggattgccttctccccacgttgttagtgccctttgatatgcaatttttttttttttttttgagatggagtctgactctgttgcccaggctggagtgcagtggcatgatcttggctcactgcaacctccgcctccctggttccagcgattttcctgcctcagcctcctgagtagttgggattacaggcacccgccaccacacccagctaatttttgtatttttagtagagacggggtttcactgtgttgactaagttggtctcgaactcctgacctcaagtaatccacccgtctcggcctcccaaagtgccggagttacaggcgtgagtcaccgcacccaggctgatatgcaaatattttaaacttctatgacgttccactttatctatttgttcttctgttgcctgtgcttttggcgccatatccaagaaatcattgccaaatgcaacgtcaggaagcttttcccctgtgttttcttctaagagttttgtggttttagctcttgagtttaggtctttgatgcaagttgagttgatttttgcatgtggtgtaagggctggtccagcctcatgctctgggctcttgattcacttctcttcttttctcacgcccagctggttccgctgggtggcggggaggagtggggaagtcccgggctgggcctgcactcgatcatcccctctcaggccagccagggagtctcagctcctgcccaggacctggctggacgtgctccctaccgggaaagcctgggccgtctttctaggctgatggcagggccagcccggggcgtcctgaggcctgccctgcggacatgccccttgttctaggtggtgtggctgcccggcctgcgtgtgagaccagctgtctgtgcttcaggccatggaggctgagtgtttccagcctgtccccttgctcggctctccctctggggaagcccctgcagcccattctctgcctccgcttctgccatctgtgcctttgtctgcttcctgtttggaggtggtcatccctggggccacccctcatgatctggacacaagtctccatcctgaagccaccacccaaacccctgtgcctcaaacccctcccacccaccacatggggttccactgtgaccaactcagcagctgatgaagcttcccttggggctctcctagcaacggggagctggctttcccggaggcctggcctctccctaagtggaagtggggcgtgagggtgtcagcctttttctgctgcctggtgctctaggttggcttgtcacccctggaagcacttgccatccttatacagcaccccacacccacctccccgcctcctaccccttcttccaaggggtcatctctgcttccctccccacccaacctcacccatgtggtccgcccagcaacctttgacccccaacatgacaaaataaacctcccttgccggtcactcattcattcattcagcattgggtgctccctgtggacttggcgctggggtcccgtggaggacaaagccagacacagtccttgccctcatgggactgcacaagtgcaagaccacatcagtaaacgtgaaacacaggaagtgacaggtgtgacaaaggggaccagtggcaggacagaacctgcggttcgtaggaccaggtcaggagggctgcctcggggggacaccttcgggctgagcgcagaaggatgaggggagtaaaccaggctcaaacccagcaggcagaggcgatcgctgcaggcaaccggcaatgtgttcaaaggccctggggcgcggggggctgaggccggcagcacggcaggaagtaagactggggttgaaagagactgactgtcatgttgtgaaatatacacttggttttcatctccatttcctggcacacaactcctaaaatccttggaatctccaaagtgatgtctttttggatgctcatgattgacagaccagctggcagcttcaggatggttcccagggaagaccaggtagaatcacaaggttcagcaccaccccgcaacctccaggtaggggagaggggctgaaggttaagcagatcatcagcggccaatgattgaatcaatcatgccttcgtaatgaggcctccgtgaacactcagaaggatggggttccgggagcttctggatggttgagcatgtggaggctcctggagggtggagcgcctggggagcacatggaagctctgcgtccctcccccataccttgccctacacatctcttcccctgtatcctttgtaatatcctttataataaactagtaaattccatgagccccaggaacatgtgtaaaagaaaaaaaaaagaataaaccatagctgctgtagcaagttaatcctaccagcactggctctcatctgccgaccttacctctggcaatgcctccctctcctgggctcctgggacccctccggccccaccacccctcctgtagtggtctcgctggctgctgccctcaggttagtttatttttacccggcctgctcccaccaggggctgaggcctccctgctcactccagcttcctggcccgtctcttgctctgggcacccccccactccgaacggccagagcttctgaagccgctcgctgtgtgcccccgcctggccccatgcatcccgcacggtgctccccagggtctcccactggcaagggcattggcatagattctggggctgccttggttcaagcccaccctgactgggagcctgagggtccctgagggggtcctgaaggccagggcaggcaaggctggcatgctctgggcagtgggggctgggtatgggaggggatcgtgggtggggagattcctcttaaccagcggcccacgtttggagactgatttgggctccaggctacgccttgaaattgggacagagagtggcgcagatctcagcccggagactccctctgcctgtggacgccctcatacctccatccgtggagccaccctcctctttttttttctaaatggggaaactctgacttgaacactgaataaacaacacaccctcgaaatcagcgaagaggcactggctctgaaactttgccatgaaagcttgaaaatgctctttggaccgatttgctggaacagacgggtgtgatggggctgcggggtttcaggtggcaggaggcgtccccgtgcctagggcatcccgatgctcagagtttccccgtgcccagtgtgtccctgtatccagggcatccccatgcccagggtgtccccgtgcctagtgtgtccctgtatccagggcatccccatgcccagggtttccccgtgcccagggtgtccctgtatccagagcatccccatgcccagggtgtccccgtacccagggtgtccccgttcccagggcgtcctgtgcccagggtgtccccgtgcccagtgtgtccctgtatccagggcgtccccatgcccagggtgtccccatgcccaggcactgcctctccccactttcctaatctccctccaccaacaggtgtcagctgtgaaatgcctgctgtgtgtgtcctttggttgagttcatcttgtgctcttaagttcctgttagacacaggcaggctgctttagttcttctggcaaatgttttgttgttgttgtttgatacggggtctcactccgtcacccaggctggagtgcagtggcgccatctcgcctcactgcaacctccgcctcccaggttcaagcgattctcctgcctcagcctcccaaatagctgggatgacaggcgtccgccaccatgcctggttaatttttgtatttttagtagagatggggtttcaccatgttggtcaggctggtcccgatctcctgacctcaagtgatccacccagcttggcctcccaaagtgctgggattacaggcatgagccaccgtgcctggcccgtctggtgaatgtttattgaggcctactatgtgcagcccctctcttaggtgcttggcctgtaatgaggagcaacaaagacacagtcgctggtcgcttgttacttaacagttggaactgagaggcagtccacaaatgagcaaatccataggtggttttagatgaggactgtgaagaagctaagaacaggttgctgggggtgcatatctgtgtgtgtggcgaggggattaatggaagccctttctgagtggtgacactgagctgaagctgtaatgaccagaaggacccagccaggccaaaatccaagggaagagcaacctggcaaaggaaacagcaggtgtgaaggcccgaggctggagcctggggaaggtgggagtggctggagtgtgttttcagagacgggccatggtgacaccaatgcgacaggcagggccaggtcgtgccgggccttggaggccctggtgagggcttgattttattctcactatggtgggacctcagtgccctgtggctgctgagaatggccaggggcaggcagggaggcctgctagggaggaggctgctgcaggccctgcagctggagagggaggatcaggatctctttagagaggaagttggagagggaggatctctttgattgctggatggacccacctgcctggctgcccccgtcagcatccagcagaggccactggatgctgacaggtggccggccctgcccagccttgcactgccctgtgctgccctggtggctgccggctttaggaggagcgcttttggtgtctgagcccagtggtcctggctgtggtttggtacacttggccgtgggtgaggccaaggtggtttggatcctgggaaggttgggtacctggcagcctcaaggcaggagctggggtgttggaggaggaagcacgctcatccctcgttccttcctgtttcgtgggatgctgagtctctgggcagggacatggtgagccctggtgtgatgcacttaacacctgctggtgcccccatccccaagcaggaaccctggtgcctggtgcctgaggactgctgtccaccgtcccaccatccttcaggtttcttcccagcctctgactcggggcaaggttcagatatccagaacattcttggctggctcttggagctggggtgaggcagaacctccctcccatatttacagcaccagccaaggcttcggggtttggacaccatccctgggaggggtgagcaggacaagtgaggtctccagacttggggtggcttcggactggccaggcaggtgggtgggggctgcagtccatgcccccgctccaggcaacacagtcgagctgcagcccccgctccatccccagctggggctccctgtgctcaccttctgcttccttcctctccctcggaatggggggtggacactccaagactagcctcccagccactctccctgcctcctgcctcctctccttcgggacagacccctgtgatcgctgggtgttcctgatgctctgtcccctctgcgtcctgtgccgtgggtgagagagggcttcggggggacttccccctcttggagcacctgctgctccgggtgcctctgggggcgggcccccacctcacattgtggagctggtgtaggaaggaaggtgccgggagccagctccaattcacgtgctggctgtggccctcaaggtgtggatggcaggaggtggtgagacagggactcattgatcatgggactgacaccccctcatgttgatgtgggccctgagccataatctcaccagctcctgagttttggcgctgctcttggcgatggcgtggactcagccaggctctcgggcagcctttcctggattcttcctccgttctcccctgggcagtgtttctgttcacctggaaaggatgggtaggacttggagacaacagggattcaaagaagtcgggagtgggggcacctgtgcagctcaccctgcagaacagacaatttggttaaagcctaaagcctgctgtcaggagcctcgcttgcctctcagagagcacatggcttgaccatcacggggactgggggagaggcacaggcatgcctgtccggcagcagaagggaaccccgggcctgggcctctccattctgtggcgttgtctttcctcagagttgcactgtctccctcactgtccctgcctggccccagtgctcatgtggcttgtggccctcagtctgggcttggtctcccgcaattcaccctgcccagccccacacagcttgtccctccagctgggaatcggagctcacctggagtcccaggcagcagattcgatgcagtgatgcagggctgtcagccatgccagcaggccctgctgctcacagagggatgggtattgctgttgacaataattaaagaactacggcttcaggctgggtacagtggctcacacctgcaatcccagaactttgggaggccgaggcaggagaatcaattgaatccaggagttccagaccaggctgggcaacatagcaaggctttgtctttacaaaaaataaaaaataataataataataaaaactacagcttcagaatgattgacttcagcatgtttataaagtcaagggtcttcagtgtcctgggcctatgtcactgcgtcagagggagagaggaagaggctggggtgatgggcactggggcttatgctcctcctggaatgggtggtcttggactgtgcctgtgtgatatgtttgtcgagcgggggcggtgtccactgaggactggatgttgaggtgtgggtggggggaggttatgaagcactgggcatttcccgtgcaccagtgccccgagattgcagagaggggacccgcccagcctgggcagggaggcgggtggcagcgaggaaggggagaggaactcgggtgcagaaagcctttcctccagcaggtggcgccgcaagctctcgagagtccagctcctgcggggtttgcattttcactgaatttgtgggcagaggctgcctgggtgtagtttccgccaactgtgactgctcactgcgggcgaggggaagtggagtgcagagaatgcaccggagggcagatgaccagcccccgcacaggcacgggggtgcctccttccccgcacaggcacggggggcccgagcccttggggttcctgtcctaactgggcggggaaagggagggttggaagctgagttagggggaaagggggtggtctcctgccatctcttttattttatttttcctatttttggttgataggtttcaatcttttttacatttttccaactttttgccgtaaaacttttcaaacatagaaaagatgaaagagggctgagtgtggtggctcatgactgtaatcccagcactttgggaggttgaggtaggaggatcacttgagcccaggagttcaagaccagcccgggcaatatagtgagatcccatctctataaaggatacaaaaaattagtcaggcatggtggtgcaggcttggagtcccagctactcggaaggttgaggtgagaggattgcttgaacctgggaggttgaggctgcagtgagctgggattgtgccaatgcactccagcctgggcgacagaacaaaaccctgtctcaaaaacaaaacaaaacaaaaccacaaaaaaaaaaaccatgaaagattctaaagtaaacacccatgcacctaccacctagattccacagcaaccattttgctgtttgcttcaccacaaatccctctggccaccagcatccacgctggttttgatgcacttaaaataagctgcagaaatcagcacacaacatcctgtcaacacctcagtttgcatttcattaactagagtccggcatttgtctgtgattatttttgtttttctttgaagtaaaatgtatataccctgagatgcacaggtgtgaaacgttccgttctttgaattttaacaaaggtatccacgtgtatcccagcctgaccagaacatagaacatcactatcaccccagtaagttcctcatgcccctccaggtgcatcacagtccccaccttccccagggcaaccacaattgtgctttttttccaccacgaaataattttgccagtttgagtgtttcttagagctacccatgttgctgcaggtgccagcgatttgttctgttttattgctgagtaacgtccactgtgtgaacattctgtgggtttttagtcattctcttgttgaaagacccctggctgtttccatctggaggctcttatgagtaaacctgttacgctggttcttcttgtacaagtttttctgtgcatatgggcgttcatttattctgtagaaacacctagagtaggtatagggtaggtatacatttagttttataagaaactgccagatcttttcccaaagtggcccttccatttcacactcccaccagcaatggatacgagttctagttgctccacatcctggccaacatttggtgctgtcactctgtgaaatcttagtcattctggtgggcgtgtagtggtatcatctcattatggctttaatttgctttggcctgatgactaatgcggttgagcacattttcatgattggctcttcatatatttttcctttgtgaaatgtcttttcaaatctgttgctcattttaaaattgggttgcttgactttttcttctggatactgatcttttgtcagatacgtgttttacaaatattttattccagtctgtggcttgcctgttcattttctttcctttttcaagaacaaggtctcgctgtattgcccaagcaggtctgaaactcctgggctcaagctgtcctcctgcctctgcctccccaagagccggttttacaggcatgagccaccatgcccggcctgttcattttcttagtggtattttccaataagcaaaagtgtgtcactttaatttttatgaagtctaatttaacaaactcctttctttgtggttctctctctgtgttctttgtaagaaacctttgcctaccctgccaaattgcaaagatatttatgttttcctttagaaggcttagagttatatagcttttatgaattaacttttgcatatggtgtgaggtagagggtcagggttcattttgttgtcgttttatgtgtttattcagttgttccaaacttcatttttttttaaagcttttattttgtattttcttggtgacttatgaggtcgcacaattttccaagatccttgttggtcatttacgtattttcctttgtaaaattatctgtccacgtcttacttctttttaaaaattatgttgtttcaagatcgagtgatttctgaagccttcattttataatgcttgaaagaatgaacaccttgttccccagctacaggcttctgctctttgtcctgcagctgcacagtggggtaagacttgggttttgttttgttgctgctttgttgtttcttcatttgactgtttccccatgggtctcatttaaaaaaaaaattggccgggcacagtggctcacgcctgtaatcccagcactttgggaggccgaggcgggcagatcacgaggtcaggagatcaagaccatcctggctaacacggtgaaaccccatctctactaaaaatacaaaaaattagccgggcgtggtggcgggcgcctgtagtcccagataatcgggaggccgaggcaggaaaatggtgtgaacctgggaggcggagcttgcagtgagccgagattgcaccactgcactccagcctaggtgacagagcaagactctgtctcaaaaaaaaaaaaaaaaaaaaatgttgtttcatatgttttttatatattctggatataagtcctttatcagatatatgtatcataagtttttttttccacattgctcctttccttttggttttcttaatgatgttatttaatgagcaagagtattttgttttcataaagtccaatttatcaactttttccagtttcgatttatgatttttgtgacctatggaggaaatctttgcctacactaaggtcaaaagaagttctcctattttctagaaattttatagttgtatattctatgattccttttattttttaattttttaaatttttacattttttaacctattatagccgtcaggatgttgtatgatccattttaaatcagtttttgtatttggtttgaggtcagggttaattctcgtttttctatactcatatccagttctagcaccgtttgttgaaaagacataccttactctattgaattacctgacacctttgctaaaaatcattgactgtatatgtggccctatattagtatatgtacgtatatacatgtaggccctgtgttgactgtatgtgtggtcctatattagtatatgtacgtatatacatattggccctatgttgactgtatatgtggtcctgtattagtatatacatatcagccctatattgactgtatatgtggtcctgtattagtatatgtacatatatacatgtaggccctatgttgactgtatatgtggtcctatattagtatatgtacatttatacatgtaggccctgtgttgactgtatatgtggtcctgtattagtatatgtacatatatacatataggccccgtgttgactgtatatgtggtcctgtattagtatatgtacatatatacatgtaggccccatgttgactgtatatgtggtcctgtattagtatatgtacatatatacatataggccccgtgttgactgtatatgtggtcctgtattagtatatgtacatatatacatgtaggccccatgttgactgtatatgtggtcttgtattagtatatgtacatatatacatgtaggccctatgttgactgtatatgtagtcctatattagtatatgtacatatatacatgtaggccctatgttgactgtatatgtagtcctatattagtatatgtacatatatacatgtaggccccatgttgactgtatatgtggtcctgtattagtatatgtacatatatacatgtaggccctatgttgactgtatatgtggtcctgtattagtatatgtacatatatacatgtaggccctatgttgactgtatatgtggtcctgtattagtatatgtacatatatacatgtaggccctatgttgactgtatatgtggtcctgtattagtatatgtacatatatacatgtaggccctatgttgactgtatattatatgtggtcctgtattagtatatgtacatatatacatgtaggccccgtgttgactgtatatgtggtcctgtattagtatatgtacatatatacatgtaggccccatgttgactgtatatgtggtcctgtattagtatatgtacatatatacatgtaggtcctatgttgactgtatatgtggtcctatattagtatatgtactatatacatgtaggccctgtgttgagacactattgtgttttcttgatattttgtccattcctttgctgatgccacatcttgattaatgtggctttacagtaagtcttaatataaagtctctcaaatatctaaaatattactttgaatattctaggtcctttgagtttccttataaatttaagaagtagcttgttgatgtctacaaaaatgcagtgtgaattttggttgagattgtgttgaatctgtagatcaattaaggaagaattggcattttaacaatattgagtcttttgtatagatggtatatctccgttttaaaggtccttttgtatttcttttatttctctactgaaaaaaaatctctacagaattacattgttttgtagttttcaagaaaaagatcttgcatgccatttgttaaatttattcctaagaattttacttttggcactattttaagctgaaatagattttaaatttcatttttaattatttgctgctagtatgtaaaaatacaatagatttttgtatgtaaatcttatatcctatgatcttttccaaagtcatttattactctggtaatggttttgtaggtcttttaggatttaaatacatagttttacttctttctgatcttgatgccttgtttttttttcttgctttattgcactggttagagctgccagttcagtattgaatagtagtgattagtggacatccttgcctgtgccaaacttataatgttaactttagatttgtcatatatgacctttgtcagattgaggaaattcccttctattcttaatttgctgaaattttttaacatgaatgggtatgattttagtaaatgctttttctgcatctatggaaatgatcattgttttgtcttttattcgtttaataggataaattacaatgattgatttttgccccccgttttttttttttttttttttaaagaaacagagtctcactcttgcccaggctgtagcacagtggtgccatcgtagctcactgcagcctgaactcctggacttaagcaatcctcccacctcagcctcctaagtagcagggactataggcacatgccaccatgccaagctaatttttaatttttaaaattttttgtacagatggggtctcattgtgttgctcaggctggtctgcaattcttgagcttaagcaatactcccacctctgcctcccaaagtgctgagattacaggtgtgagccactgtgcaggcctgattttttaatattgaaccaaccttgcatttctggaagaagtccaacttgcttatgagatatcatcctttttatatattgctaaatttgatttgcccagtttttaaggatttttgcgtgttgattcatgagggatattggtgtggtattttctttgtttgttagtttgtttcggtaatgtctttgtcagcctcattttggcttcataaaattagtttggaagtgttcccttctctttgttttctgtgttttcataaggttgatgttgtttcttccttaaatgtttgatagaatccaccaagaaaaccgtctggacctagaattttctactaggaaaggtgattgtttgtttttaatcacaaattcaatttaatgtatagaaagagttattcaggtttttttacttccccttgtcttacttttggtaagttgtactttgaaggaatttgtccctttcaggtaagttgttgaatttactcatttaaagttgttcgtaatacaagcatacctagggtttgcttccagacctcggcaataaagcaaatattgcaataaagcacgtcacacaaactttttggtttcccagtacatataaaagttatgtttaggccaggcatggtggctcatgcctgtaatcctagccctttgggaggccaaggtgggcggatcatttgaggttaggagtttgagaacagcctggccaacatggtgaaacctcatctctattagaaatacaaaaattagctgggtgtggtggcacatgcctgtagtcccagctgcttgggaggctgaggtgggagaattgctcgaacctgggaggtggaggttgcggtgagctgagatcacaccactgtactccagactgggtgacagggcgagactccatctcaaaaaaaaaagaaaaaagttatgtttacactatactatagtctattaaagtgtataagatcattatgtctttttgctaaaaaatgctaataatcatctgagccttcagcaagccataatctttttcttggtagaaggtctgcctcaatgttgatggctgctgaccaggtggtggttgctgaaagttgaaggtagctgtggcagcagtttctttgtttcttttttctttttctttttttttgagacagagtcttgctctattgcccaggctggagtgcagtggcacgatttcagctcactgcaacctctgcctcccgggttcaagcaattctcctgcctcagcctcccgagtagctgggactacaggtgcctgccaccacgcctggctaatttttgtatttttagtagagacagggtttcaccttgttggccaggctggtctcaaactcctgacctcaggtgatccacctgccttggcctcccaaagtgctgggattacaggcgtgagccactgcacctggccggcagtttcttaactgaagtttttgacatgggttgactctttctttcatgaaagatttttctgtggcacgcattatgtttgatagcatcttacccacaatagagcttccttcaaaattagagtcaattctttcaaccctggccacggattgatcaaataagttgatgtaatattctaaatcttttgttgtcatttcaacaatgttcacagcatcttcgcctggagtagatcccatctccaggaaccactttgtctgctcatccataagaagcaactcctcatctgttcaagtttgatcatgggattgcagcaatccagtcccatctccaggctccacttctaattctagttctctgctatttccaccacatctgcagtgacttcctctgctgaagtcttaaaccgctcatccatgagggttggaatcaacttcttccaaactcctgttaatgttgatatttcaacctcttcttgtgaatcacaagtgttcttaatggcatctagaatggggaatcctttccagaaggttttcaatttactttgcccagatccattagaggaatcactaactatggcagatactgctttataaaatatatttcttaaataataagacttgaaaatcaaatttatcccttctccatgggctgcagaatgggtgttacattagcaggcatgaaaacaacattcatctttacatacatctccgtcagagctcttgggtcacaaggtgcattgtcaatgagcaataatattttgaaaggattcttttttcctgagcagtaggtctcaatgatttttttttttttttgatggagtctcgctgtgtcacccagaatggaatgcggtggcatgatctcggctcattgtaacctctgcctcccgggttcaagtgattcttgtgcctcagcctcctgagtagttgggattacaggcacacaccaccatgcttggctagtttttgtattttttgtagaaacagggtttcaccatgttggccaggctggtctcgaactcctgacctcaggtgatccacctgcctcagcctctcaaagcattgggactacaggcatgagccactgcaccgggccctatttgttttttttttgttgttgttttttaattgagacagagtctcgctttgttgcctagactggagtgcagcagcgctatctcagctcaccgcagcctccgcctcccaggttcaagtgattctcctgcctcagcctcctgagtagctgggactgcaggtgtgcactaccatgcctggctaatttttgtatttttaatagagatgaggtttcaccaccatgttggccaggctggtcttgaactcctgaactcaggtgatttgcctgccttggcctcccaaaatgctgggattacagctgtgagccaccgtgcttggcccttttttgtttttttgttttttttcaaattgagacagagtctccctctgttgcccaggctggagtacagtggcacgatctcggctcactgcaacctccgcctcctgggctcaagcggttctcctgcctcagcctcccaagtagctggaattacaggcgtgtgacaccatgcctgaataatttttgtatttttagtagagatgcggtttcaccatgttggccaggctggtctcgaactcctgacctcaagtgatccccccgccccggccttcaaaagtgctgggattacaggcgtgagttgccgcaccaggcctcaatgggtttttaatattcagtaaaccatgctgtaaacagatgtgctgtcaagtagggcctgttattccatttctgaagcatagacagaatagatttggcagaattcttaagggccctaggatttttggaacggtcaatgagtattggctttaacttacggtcaacagctgcgttagcctctcatgagagtcagcctgtcctttgaagctttaaagacaggcattgacttctcccctctagctatgaaaatcctagatgacatcttcttccagtagaaggtgggacatctatgctgaaattctgttgcttagtgtagccaccttcatcagtgctctgagctagatcttctgggtaacttgctgccgcttctccatcagcacctgctgcttcaccttgcacttttacattatagagatggcttctttccttaaacttcatgacctgacctctgctagcctcaaactttccttctccagcttcctcacttctcttagccttcataccattgaagagagttagggctttgccctggattaggcttttgtttaagggaatgttgtggctgatttgatcttctatccagaccactcaaactttctccatatcagcattaaggctgttttgctttcttcttcttcatgtgtgcactggaatcgcacttttaatttctttcaataactttttcttggcattcacaacttggctagctatttggcataagagatctcacttttgcctgtcttggctttcgacacgccttcctcactcagcttaatcatttctagcttttgatttaaagtgagagacgggtgactcttcctttcacttgaacacttagaggccattgtagggttattaattggcctaatttcaatattgttgagtctcagggaatagggatgcctgagcagagggagagagagcggggaacagccagtcagtggagcagtcagaacatacaacgtttattgaataagttcactgtcttatctggatgtggctcgtcatgccccaaaaacaactgcaataatggcattgaagatcactgatcactgggcgcggtggcccatgcctgtaatcccagcactttgggaggccgaggcaggtggatcacctgaggtcaggagtttgagaccagcctggccaatatggtgaaacctcgtctctactaaaaataccaaaattagccaggcgtggtggcgggtgcctgtagtcccagctactggggaagctggggcagaagagtcgcttgaacctgggaggtggaggttgcagtgagccgagatcacaccactgcactccactgcactccagcctgggcaacagagcgagactccatctcaaaaaaaaaaaaaaagggccgggcgcagtggctcacgcctgtaatcccagcactttgggaggccgaggcgggcagatcatgaggtcaggggattgagaccatcctggctaacacgatgaaaccccgtctctactaaagatacgaaaaaaatagccgggcgtggtggtgggtgcctgtagtcccagctactcgggaggctgaggcaggagaatggcgtgaacccgggaggcggagcttgcagtgagccgagatcgcgccgctgcactccagacagagcaagactctgtctcaaaaaaaaaaaaacaaagaaagaaaaaagaaaaaagagatcacagatcaccatagcagatataataataatgaaaaagtttgaactatttcaagaatcatcaaactcctacacagagacacagtgttaacatgttgttggaaaaatggtgccagcagacttacttgatgcagggctgccacgaaccttcaatttgtaaaaagtgcagtatctgtgaagcacaatgaaatgaggtgtgcctgtgttccttgtcactgtaatgtcggtaggatccgtaaggaaaacacttcattccttttattgtgactttatgttcgccatctccctctcatcagcagcctggctaggaggttatcaatctagatctttttaaagaaccagcattggactccccttttctggtgtccatttccttgagtttctctgttatcttcattacttccttccttgtacttgcttcagcgcattagtcagggcccagtcaggaaacaaaaaccacaccggcaatttgaatagcaacttgtaatataaagtgttcttaactgtaagaggtagttaactattaaagggatcacaaaggggtgacattgtgatataagaaagatgtatttgggctgggctcggtgcagtggctcatgtttgtaatcccagcactttgggaggctgaggcaggtggatcccttgagctcaggagtttgagaccagcctgggcaacatggtgaaacctcatgtctaccaaaaatacaaaaaattatcctggcgtggcggtgtgtgcctgcggttccagctacttgggaggttgaggtgagaggatagtttgagcccgggaaggcagacgttgtggtgagccgagattgcactactgcactccagcctggatgacagagggagactctgtctcaaaaatcaatgtatctgtctgtctgtctgtcttctatctatctatctatctatctatctatctatctatctatctatctagtctctgtcccccaactttgtttggcatgtagctcctaaaactcttgaaatctccaaagtgatgggtgtctttttgtttgctaaggaggcgactggtggctggaggctcctggacagcctggggataagggctggttgccaggggacccagccttgtgattagaaggctagaacttgcagcctttcccatccacctcctgcgaggcaagaggggatgaaggttgagttgatcatcaatggccaaagatttcatgtcatgcttatgtagtgaagcctccctgaaaacccaaaaggatgaggtttgtagagtttcaggttgttgaatacctgcaggtgctgggagggcagtgtaccctcccgtggaagctccatgccgcttccttcatacctttcttatgcatctcttccagttggctgttcatttgtatcctttgaaatatcatttgtaataagtcagcaattttaagtaaactgatttcctgggttctgtgagtcactcaagcaaattattgaacctgagaagggagttgtgaagacctcaaatttgtagccaagtcagacagaagttatgggtaacctggtgtcttaccacttgcgactgatctctgaagttgagggcagtcttgtgagatggaacccttaacctatgggatctgcactaactctggttggtgtcagaattgaactgaattgcaggacacccagttggggactgctgagtattggagaattgcttgggggtcggcgggaggaaaccacacatctggtgtcagagctgaagcactgagtgttgtgaatgagagtggagagatagagtttgttttgccttatgcaagaggactctaaggagtatagaaagagcaaatatgagaagcagctactttagaagaaaacataggaggaaagcttcgtgacattggagttggcaatgctttcttggatgtgacaccgaaaatacaacaaaagaaataaatgataaattggacttcaccaaaacttaaaacttttgtgcatcaaggaatactaccaatggcgtgaaaaggaaatccacagaatggaagaaagtatttgaaaatcgtatatccgataaaggactagtatccagaatatataaagaactcctacaactaagccacaaaacaaaaaaaaacaacccagtgaacagacatttttccacagaagacataccaatggccaagaagcacaggaagagatgcgcagtgtcactaatcatcagggaaatgaaaatcaaagccacaataaaatatgatttcacaccctttaaggtggctgttagccaaaacatggataacagcaagtgttggcaaggatatggagaaattggagccccgtgcactgctggtgggaatgtaaaatggtgcagctgctgtggaaaatatataacaattgctcaaaaaattaaactcagaatgaccataacatccagtgattccacttctagatgtatactccaaagaactgacagcagggacttgaacaggtgtgctacattcttgtttgtagcagcacttttcccataaccaaaagatgcaggcaacccaggtgtccaccagcggatgaatgaacagacaaaatgtggtccatctgtacagtggaatattattctgccttaaaaaggaaggagaggccaggtgtggtggctcacgcctgtaatcccagcgctttggaaggccgaggtgggcagatcacttgaggtcaggagtttgagactagcctggccagcatggcgaaaccctgtctctgctaaaaatacaaaaattagccaggcatgggggcatgtgcctgtaatcccagctactagggaggctgaggcaggagaatcgcttgaactagggaggtggaggttgcagtgagccgagaccatgccactgcactccagcctgggcgacagagcaagactgcctcaaaaaaaaaaaaaaaaaaaaaaaaaaaggagattctgacacatgctatagcatagatgagccttgaagacatgctaagtgacagaagccagacatgaaaagacaaatactgtatgatttcacttttatgaggtccctagagtagtcaaattcagagagacagaaagtgggatggaggttgccagaggctgggggaagggagaatgaatgggaagttggtgtttaatggggatagaattgcagtttgggaagatgagatggatggtggtgatggttacacaacagtgtgaatgtgcttcatgccaccaaactgcacacctgaaaatggttaaaatggtaaattttctgtgatggatactttaaggcatgtatgcaaacacacagaagcagttactaccactggggttgatggaaaagaaaccaagaactcggagcgtcctccacaccttgccacgtcttacgttcaggccttgttggagagtgtgtgactgccacagaaacctgcagcctactggtaacaaaaaggttcttgccagaaggtgtagaaagagtggatctgcaggatcagcttactgggtagccgagaaacctactagagggtatgggtgggcaggagctgggtgtctgagaagtttgctgaggtcccattgggctagagctggggtgctggagaaactcagtacagagcaggccccactgggcacacgccactggcagctgtgccttcagaggaaaaagagaccctggaaccaggaagagaagctgctacctcagcaaggcctggcagctccccacagtgttgtcccctgtggatagagcctgacatgactgtatttggccaaggagaaagactcataaggcctcggtccagtatcacggagcggggcctggcaggatgtatgcagagttaagaggcaatacatgggtaactggcatatttttccagattctttgttttttttgttgttttgttttgttttgttttgttttgttttgttttgagagagcatcctgctctgttgcccaggctggagtgcagtggcatgatctaggctcactgcaacctccacctcccgggttcaagccattctcctgcctcagccttctaagtagctggagatgcccaccatgcccagctaatttttgtatttttagtagagacagggtttcaccatgttggccaggctggtcttgaactcctgatctcaggtgatccacctgccttggcctcccaaagtgctgggattacaggcgtgagctacactgcacctggcccatttttccagattcttaaagcagatccttaggtctttttttttttttttttttttttttttttacttcttttctaatataagcacttacagtttccctctaagcactagcttcagcctacgtattttagtatgctgtgttttcattatcatttcatttgaaatattgtaaaatttttcttgtgatttcctctttgactcatgggttatttagaagtatgttgtttaatttgcaaatagtcaaggctcctctgagtatcttagagctattgatttctaatttaatcttactttggccagacaagcatattttgcatgcttttaaaatttgagacttatggcccagaatgtgtatcttggtgaatgcactgttttcacttgagaaaaaaatatgtatatatattctagacttcctgagtatagagctttataactgctgattaggtcaattgctagttaccagtgttcttcagattatctgatgcttgtttctcagatgttgagagaatggtgtttgctatggcctacctgtttgtgtcccccaaaattcatatgttggagcttaatctctggtgcagtggtgttgggaattggggcatcagggaagtattggctcatgagggcagagtcatcgtgaatgggattagtcccttctgccatgtggggacacagcaggaaaaggacatctctgaagcagggagctagctctcaccagacactgagcaccctgattttggacttcccagcctctagaactgtgagcactgcaatctgtttataaattacccagcctaaggcattttgttttaacatcctgaatgaactgaggtggtgttaaaatctccaactatgcatccaggcgcagtggctcacacctgtaatcccagcacttcaggaggccaaggcgggtggatcacctgaggtcaggagtttgagaccagcctggacaacatggtgaaaccttgtctctactaaaaatacaaaaattagctgggcgtggtggcaggctcctgtaatcccagctactcgggaggctgaggcaggagaatcgcttgaacccaggaggtggaggttgcagtgagccgagattgcaccattgtactccagcctgggcaacaagagtgaaactccgtctcaaaaaaaaaaaaaaagagtctccacctatgattgtggaattgcccatttctccctttaattctttcaggttttatatcatgtattttgaagctcctttggttaggtgcatacacatttatgattataatggtgtctcgatgaactgatcatttaaccatgatgaatgtattcctttatctcgtaataattttatcttggactcaactttattgatatttatgtagcctctccagccttcttaaacatgctgtttgggatgcataagaaggctggagaggcttatggagaaacttatgatggtttgacttacagtttttcaactttaccatggtgcgaacgtggtatgtatacagtagaaactgtactttaagtatgtgtgaaaccattgtgtttctcactttcagtacagtattcaataacttacatgagatagtcaacactttattataaaataggctttgtgtttgttgattttgctcaactgtaggctgaagtaagtgttctaatcatgttaaggtaggctaggctaagctagaatgttcggtaagttagatgtattaagtgcatttttgagatgatatttattttccacttatgatgggtttgtcaagacataactccatcatcattcaagcagcatcagtatgtctttttccaaacagaaaatttcaacctgtgtttatactgaaacagcatcttttgtagatagtatatagttgagtcttgctattttattcattctgacagcctccgccttttaattggaatattcaggctatttctgtttaacatagttatagatatgactgggtttagagctactaccttgctctttgatatttatttctttcatcttgctttcttggcttcttttatgttaattaagtattttttagaattctattttaatttatgttttttttttttttttttttttaagacagagtctcactctgttgcccaggctggagtgcaatagcatgatcttggctcactgcaacctctgcctcctgggttcaagtgattctcctgcctcagcttccctagtatactgggattacagacgcctgccaccacggccggctaatttttgtatttttagtaaagacggggtttcaccatgctggccaggctggcctcgaactcctgacctcaggcgatccgcccaccctggcctcccaaagtgctgggattacaagcgtgagccactgagcccggcctgttttgactttttaattgtatctctttgtattgctattttagtagttactttacagattctattgcacattcttagcttttcacagtctacttagaattaacattgtttttcttcatggaaaaaaagtgtaagaactaggcaatcctatgggttcatttaccactttccatcctgtatgtgatggttgttagatatttactacatccatacacattgtaaactagacaatacaataaggaaatttttgctttaaacagccccatgcattttaaagaaattaaaagtaaaacagaatcttttctatttgcccatgtatttgctatatcctgtgctcttcattccttcctgaagagctgagttcccatctggtctcatttcccatgatcttggagaacttgcttcacggtttttgtagtgcaggtttgcagacagctaattccctttcattttcacttatctgcaaatctttattttgctgtcattctttctttttttatttttatttttatttttgagacagagtctcactctgtctccccacaggctacagtgcaatggtgtgatttcaaaactcctgcccaatctcaactcaccaaccttctcctcccgggctcaaacgattctcctgcctcagcctcccaagtagctgggactacaggcatgtgccatcatacccagctaatttttgtatttttagtagagatgggatttcaccatgatggccaggctggtctcgaactcctgacctcaagtgatctgcctgctttggcctcctaaaatgctgggattataggtgtgagccactgtgcccagcctgctgtcattcttgaaccataatttcactggttatagaattctgagttgtcagttttttctttcaggactttaaaatatagggttccagtgtctttggcctccgttgtttctgtcaaggaatcagcattcatctagctattcccctgtagaccacatgttgtttttccctggatgcttttaagactttttatccaagtttgattgctcagtacctacctctgggcaaaaaagcctccagaaaccagaaacttatctagttttattcccctctgtcaggtgtagactctactccagcttctacctacttgagatattctatactgactccaggctgttgttattttgttctttcaaatattttgtccagagctataatgttttctgcagaattgaccagatagcagctactctctgtgaccaggagccttgatcttccagacttgctgatgggctcacaaagctcctgcccgtggccctcagttggcagtggcctctctgccttgaagttgccatgagtgtgtaaaacctacaggctcaaccttcctcattagtacagtccagaaaagtggaattcctggtctgggtggctatggtgccctagaccactggctagaccagggtggtgactgccagctggccgaatgtggggtctccagcctagcacccttggactctaccccaggagttatggctgtttcagggccaggggcctggcctcagcccctgtcccccttctcttctcctcaagttgcccagcatcaggtcccaaccagcatcttttgcagacagggtgggtcggctcctcactagaggggcagggttgggagggaagcctgttgagccctccttcctgtgcagcccacagccctggggttagctccagaggggtgcagaaaggagcccccaaaggcagaaactcacccttctctctgttcttgtgcttccagggataaaggagaggtggtcctagctggggggctaccagtggcatgcaggaggcccacatgaccactgtttgctggggcctttccttctctgtgagagagacgagagagaggagagagagtgtgagtcagggtagtgtcttcttccagtaacgcagacttctgcacgtgttctctaggagaaatcccgtcactcgctagagctctagatctggaagaagctctgcctctcttctctcctccagtgcagtgtgtgtgtgtgtgtgtgtgtgtgtgtccccacatgcattacacccttctacagaggaaataattcccgtccaagtgcaaaggttgggattggagcaggcagcatgtgggctaaaggagcagagaggaggaaacgggggcgggggtgagggtgggaacaggaggtgggtagatgccacgaggcatgccttccacaactagaagggctggtggagatgaccagaatgctccagacagaccttttatcaaacttccaaaattcaatcttgtttcatgaagcctgaggaccctgcagagtgaaagacaaggaagggctttcctgcaggggggtgtgtgtgcctgtgtgtgcctgtgtgctgtgtgcccccatgtgtgtgcacgtgtggacctgtgtggtgtgtgcctgcacatgtgtgcacgtgtggacctgtgtggtgtgtgctgagtgtgtatatgtgtgtgcctgtgtgctgtgtatgcacttgcacatgtgtacacagatctcattttccttttttctggcttactaagtgccagaaagaatttccgtgagcctctccacccttcccaaggctgcacatggagggacttgcgcaggcacatgtgcgcgtgcacacaacacacacacacacacacacacacacacacacacacacacacgagtcaggggcgagcactcctgtggattgtacctaggcctggcaggaaaccgggttctgggaaactgtaggccccacctttggcagaaaaccatgtttttgttgctgctcgttgaagggaacattaagtggggctggggacagtttatgttgagaagagcaaattttgcctatggcactggggacattgagtggctcctgtcccgggctctggagggcttgggagacacgtctgcagctctgggcatctctcaaggtcacgggcggccacactcaaggttaggccctcctctgtgtgagctgcggtcagcaggaaggctgacctcagaggcggccccagggcccttggaggccctgcccctgagacatgggccaaggtcagagagccgagaaggctgctgctgaggactctggttggcgcccagcccagcggcccttcaggcgggccctgtgcaggggctgatgaagtcagctgggaaatctgtgaaataaagcacaggtcccccaggcttgcccagagccccggcatcagatgaggtgcagagaagggaactgagctgccaagtgtgaacaggagagaggagccccaggaccacacaggggccccgacatggcaggtgcttggtcagcagcggtgctgcccttactgctggacgtgggaaaatgcactgacacttgctgaccagagccggggtgagcatctgggtgaccctgcagatgagacaaaataagggctgccgtgggggaggggcccttgccgggccaccctgctgaggccctgtgttactgtcctgcggctgtcataacaaaggaccacaaatgaggtgactcaaaacatccgaaatcggccacgtgcggtggctcatgcctgtaatcccagcactttgggaggccgaggcggttggatcacgaggtcaggagatcgagaccatcctggctaacatggtgaaaccccgtctctactaaaaatacaaaaaaaaaaaaaaaattagccgggcgtggtggtgggtgcctgtagtcccagctgctcaggaggctgaggcaggagaatggcatgaaccttggaggtggaggttgcagtgagccgagatcgcgccattgcactccagcctgggtgacagagcaagactccgtctcaaaaacaaaaacaaaaacaaaaacaaaaacatccgaaatgtcttccctaaagtttctggagccagaaatcccagaccgaggtgtctgaaggttcattcctcctgggggttccgagggagactgtcccatgcctttctccgagctctgcggcggccagcaacccctggtattcctcggcttgcagctcggcctaccccccacctggccttcaccctgtgtctcttcttgtgtctctgtccaaactgccctctctgttgtctttttaatttatttttagggacaggttctcattctgtcctccaggctggagtgcagtggcgtgatcatggctcactgcagcctcagcctcccaggctcaagcaatcctcccacctcagccttccaagtagctgggacacaggcgcacgccaccatgcctggctaattttttaatttttttgtagagacgagggcccaggctggtctcaaactcctgcgctcaggcaatgagactttgcctcccaaaacactgggattagagacatgagctgctgtgcccagcctacctctgtcttataaagacacctgtcattggatttagggcccactctgattcaatatgccctcaaataacccaattacatcttcaaagaccctatgtccatataaagtcacattcataggtactggggggtcaggacttgcatatgtcttttgggggaacacaattcaacccacaatgggtctcacccacagaacgaacggcctctccagggtgtgcgcaggtgggtgaggggcccaggagagggacctgcgtggcaagagggcttgtgttcacgtcagagattccagaaggagactggatggggtggctgcatggagcaaggggctacagccactgtctccaagtagttggtgggttgtctggtagaaagggagcatttattttgagttcccccaagatatgaagctagtaccaggtacctggaaggtgctagcgagtagagcttgactctttacagaaagaggtgtttttctcacaatgttcacttgaggacggtggaacaggctatttcacaaggtagtgagttccccatgcctggaagcattcaagcaggggccatgtgggagttgttcaggagtgcatagaagggacctcagaggtccctgccaataccatctttgcttgtcttattttacgacaacttgaatttcagaatgtaatgttattggggatatgtctactagaggggcctccagcatcaggccccacacactatgcatcatttttagggcagggaatgagagcaggctccattctttttggttgtctgtgaggaccaggaggcttgctgctgaggcagcttcctgtggaaacagtgtctcagccccgcaatccattcatcggagctccaacatcttaatgaaacactgtgtcagatgggttctgggcatgtgtgtgcagattgtcacaagtccatgagaatgcacacacgcacattgcatgtgtgtgcacacatgtatgcacacatgcacaagaacacgaagacccgaggcaggtatagtccgtgagacagatccctctaggctgaaagactccccacaagggtccctagaacaaggctccagcctcggcagtccctcccacttctggtgggaggatctccacagagaagaagggtcaagaagcacagctcttgatgctcacggtgtaccaagctctgctttaagcttgtgtcttattttttacttatttagcaaatctgtcgctcttgttttgtgccagatgctgttctcagcactttacaaatattgatgcatgtttgtttcatgacaaccctgtgaagtaggtagtgttaccccgttttatagatgaggaaacaggcgtagagggataaagggacttgcccaaggtctgtctctaccttacacgcacatgaacgctcactcatgcggcaggcgctagtttccctctgatgtgagtcaggccttgagctggttggggtctgggtcccactttggttgtgttttgctgtgggcaccaaggaagcttctagcagcctcatctccctggtatgacctagctccagggactggatttccccaaatgctcctgcccagcctggagcctcctttccagctgggggagggctgaacgacccctcactcttggaggctgccggagcccctcctgcctgcatgcggccgctgccgggtggacaggcctgcttgtgggttgaggctcccagcagctggggtggatcatttctcctcccaagaagctttgggagaagcagctgagggggccagcgtcctcctgaggccaattccctgcctcccccagcgcaggcgcgaagccatctttgcttgtgtgtttgccacagacagtggagggcggtgcaatcgtgacgcctgcttgttgcactttgcgtccttgaggacgttgacccctggccggtgctgggcgcttgctcttcagtcatcttgccctgacctggcgtggcaggcccgagcactgctcttttacaaggaaacaggctcagaggccttgagtcacttgcccgggctcccccagccaataattggctgagccaggatttccatccagctctgtgactccagaagtccaagttcttcccatcacgtcagggccaggaaaggattagaatgcttttctacgtgccgattatttggatgatctgtgcagcttagctcgttgtagttgctcaataaaaatgtggaatgaatgggcctatatgtcccattgtgtgactcagagccaatgactctggctgatcctcctgttttcattccgtggcccagcatctccctttggggtgtgtgaccttggaagcagtgactctctccatcccaccttgaatggtgtctgcgccgcagcaggggagcagctggggattgccagcgcctgttgctggtgggctgtgcgccagatcccgtcttggatgtgtgggtgattgtcagccacatgtgtgtgaagggctgtgcgtgtaggatttgtgcaaatgtgcccctccctgctgccagcccatgggaggctgtcaagattctgcccctgcacattagcccacactctctttgtggcccactgctgtggctgttcccttgtgtcacgtggctgcaggcacagcccccaagtggatggggatcgtgggctgaatgtgcatcagatgctcctgcttcttggtgggtggagaccctcaacccatgcaccgtggctgccgcatctgaaaggccttccatggtgaaggacttggacctgagcaaccctccgcagaggtcttagaagtgctccctggccgggcgcggtggctcacacctgtaatcccagcactttgggaggccgaggtgggcggatcacaaggtcaggagatcgagaccatcctggctaacacggtgaaaccccgtctctactaaaaatacaaaaaattagccgggcgtggtggcgggtgcctgtagtcccagctactcgggaggctgaggcaggagaatggcgtgaacccaggaggcggagcttgcagtgagccgagatcgcgtcactgcactccagcctgggcgacagagcgagactccgtctcaaaaaaaaaaaaaaaatgaagtgctcccagctcttcctcctgtggtgaggttctgagtttccatcctcagaagaaaacctggctggggagggcatctctagacccggacataaacgccaggagaccagggctgccctctcaggtgaccaatcacagagactcagggaaagtcacgtttggaagaggcgacactgtgtctcagcctcattcatttctccatcctacagacactgcctggtgcccagcccgcaccgcgaggcttcctaagcagctctgggcaccgtgcacctggcatggcctccagccccatctccctgccttgggagacccggtggggactccgggctgagctcctgtggctgtggaaccttggtggtttattgtggtggctgagaacagggacgtggggttggacgggttgagtgtaactcccagtggctccgtgaactgcctgggagccttgggcagctctttctcactctgtgcctccgcttcctgatggaaaaatgggggccaggggggagcgaccttgaaggtattcgtgggaaccaagcgaggtgataaatgtagtgtccttggtagagaactggacacagagtccacccccatgaagggggctgctcctcctccttctatgtttcctcttgttcttatttctcctcttgtatcttctcttcctgctttccctcccnnnnnnnnnnnnnnnnnnnnnnnnnnnnnnnnnnnnnnnnnnnnnnnnnnnnnnnnnnnnnnnnnnnnnnnnnnnnnnnnnnnnnnnnnnnnnnnnnnnnnnnnnnnnnnnnnnnnnnnnnnnnnnnnnnnnnnnnnnnnnnnnnnnnnnnnnnnnnnnnnnnnnnnnnnnnnnnnnnnnnnnnnnnnnnnnnnnnnnnnnnnnnnnnnnnnnnnnnnnnnnnnnnnnnnnnnnnnnnnnnnnnnnnnnnnnnnnnnnnnnnnnnnnnnnnnnnnnnnnnnnnnnnnnnnnnnnnnnnnnnnnnnnnnnnnnnnnnnnnnnnnnnnnnnnnnnnnnnnnnnnnnnnnnnnnnnnnnnnnnnnnnnnnnnnnnnnnnnnnnnnnnnnnnnnnnnnnnnnnnnnnnnnnnnnnnnnnnnnnnnnnnnnnnnnnnnnnnnnnnnnnnnnnnnnnnnnnnnnnnnnnnnnnnnnnnnnnnnnnnnnnnnnnnnnnnnnnnnnnnnnnnnnnnnnnnnnnnnnnnnnnnnnnnnnnnnnnnnnnnnnnnnnnnnnnnnnnnnnnnnnnnnnnnnnnnnnnnnnnnnnnnnnnnnnnnnnnnnnnnnnnnnnnnnnnnnnnnnnnnnnnnnnnnnnnnnnnnnnnnnnnnnnnnnnnnnnnnnnnnnnnnnnnnnnnnnnnnnnnnnnnnnnnnnnnnnnnnnnnnnnnnnnnnnnnnnnnnnnnnnnnnnnnnnnnnnnnnnnnnnnnnnnnnnnnnnnnnnnnnnnnnnnnnnnnnnnnnnnnnnnnnnnnnnnnnnnnnnnnnnnnnnnttcccttcccctcccctccccccccacatgcaggcacactccatttggtgccccaactgcctttctccattgtccttctgtaagtggttctctaagtgggaactcaggcctggaaagggtgggcaccctgtctggtgggctctggcaggccaggcgctgagcagcctcaggagacacaaccctaggaaaaggctcatgcaggctggctgtcatgacggactgttggtgggagaggggaaggcgccgtggtaggggaagctttggaaacatccactagtggccttatttatgactcaggacacctgccaggtcactagaacacagctgaggaagctgtcggccagacgtccagaagcatcaacctggtggctgggctgtggggggacctctctggacaggcagacaaggtgtcggaggaaggggctgacactcactcagtgtctgtcatgcactgagggcacaaagggcaggatggagagctggcccacgccacctgtggaatcttccaggtgtgggggcagatggggaagcaagggggcttgaagacacatgcgctcattaaatgtccttaaatcccaagaagaagaacaaggacacatccacaggggcagggctgaaagtctgatgcatggtgttttggggtctgctcctgctgcaacagctacagtggctccctcttacctttctcttccctccattctgttgtgaaaatgttcaaaacacatggtcaagttgaaagcattttacagggaacacattcagccatcacctagattctaccactaacaccaagctacacctgctttatcacctcaccgtccatctatccctccttcgcctggccatgaatccattttatttttattttttggtgcatttcaaagtaatttcaggtcatcctgattatctctggaatcactgtcagaaattccctcccttcccctcccctctcctttcctttccttttctgagatgggatcttgctaggtcacctaggctgaagtgcggtggtgcagtcatagcacactgcagcctccaactcccgagctcaagcaatcctcctgcctcagcctcctgagtagctgggaccgcaggcatccaccaccacacccagcttcattttcaaaatttctcaccaactcctcactccttgtattcacccaggaccacttctcacaaagccagggtgctgcaggaggggtcagaaccccaagccctaatcctggctctgtcattaacactgtgcgaccctcagcaaatcattttgcctgtctaggtcctgttttcattcctatgaaacgagggcgttaaactgtatgttataaataatgagggctaccagttaccaagctcctattttaggccaggcacttttcacatgttattatgagtcctttcaatctaggtattgttctcaatggacagcttagtcaacggaagctcagagaggtggtgtaacttgccaaaagtcccactacccagtgaatgtccccacggggtctgcacccaggagtctgacacagagcccaggcctcagcacctggcgatgttttgggggtgtgagcagcccagcctactctgggcacgtgtttacttgctgttccttctgcctcatgtttgtgtttgtcccctctgaagctcagactgttattttccagttccaaataccaaaactggctaggcacggtggctcatgcctgtaatcccagcactttgggagaccaaggcgggtggatcacttgaagtcaggagttcaagaccagcctggccaacatggtaaaaccccatctctacaaaaaatacaaaaattagccagacatggtggcgtgcacctgtagtcccagctactcaaggagaacccagctacccagctactgaggcacgagaatcacttaaacctgggaggtggaggttgcagtgagccgagatcgcaccactcctctctaggctaggcaacaagtgtgagactctgtctcaaaaataataaataaataaaataaaataaaaattaaaaccaaatgccaaaaccaacccacaaaataaaccttggttaaagtagcctgttcattttgctttaactatgtatattgcaccagattctgccaggggctcagcgtataaagatgagacccctgccctgccagacaggtgggatgatggccataccttgagttagtcaaggcaccatctggctgtgtaacaaaagctaaaacatcagaggctgagcagcactcggacccacgtcccagtccaagtgtcagtcgttatgggggcccaggacagcccggacctagttcattcctttggtgcatcctcgacacacagcttccatctcttgagctgagatggttccagctcctgccgtcatgtctgcactccagccagagggaagggaagaagggagaggggaaagggcaagtgtccctctttatttttaagggcatgacctgaaagttaaacacttcagctccttcccactggccagaacccagttgtatggccgctcctgtcatcagggaggctgagcaatgtattcttcagctgggcttccctgtgcacaaccaaaacttcagttactatagaaaaaagggagctcagatattggggaaacaactagcatctgtaccacatgcactgatagctctctttgtatgaacagagctgtggcaggccctatgccagggagaaagtaagattggaaaagagcttaccaaggaggtggcatttgcactgtgcttaaggggcaagaaaaacgtcttccaatcaggagccacaaatgcttggctgaagtgctactgctctttcatcctggagctggaacagacgtcaccagtcaatcatgatggctgctgggtgcactggctaacatctataatcccagcactttgtgaggctgagggtgggaagattgcttggggccaggagtttgagaccagtttgggcaaattgcaagaccctgtctctgcaaaaaaatataaaatgtagctgagtgtggtggcacctgtagacccagccccagctactcgagaggctgagatgggaggatcgcttgggcctaggagttcgaggctgcagtgagctatgattgcaccactgcactccagcctgggtgacagagcaggacctgtctctaaaaacaataaaataaaatcaaagttttaaaatggaaaaaaaatcatgagcacataactccagatgtatcctcaagatagcaaacccgggtgggcgcagtggctcatgcctgtaatcctggcactttgggaggccaaggtgggtggatcacctgaggtcaggagtttgagactagcctggccaacagccccatctgtactacaaatacaaaattagctgggcatggtggtgggcacctgtgatcccagctacttggaaggctgaggcaggagaattgcttgaacccaggaggcggaggttgcagtgagccaagatcacaccattgcactccagcctggagaaaaaaagcaaaactctgtctcaaaaaaaaaaaaaaaaagcaaacccagggccaggtctgtagccacatggccaccttcttccctgagcatggaggcagcctcagaaacctgccccacatcacatcagtgggcagttgattgggtcagcctgccagttgaaccctatttgccacagtcattctccatagtaaggggcattctagacataccccccttcccagggaagaataagccgtagctgcctgagcgttttatccagtggtgtgcatgtcttttcccaactctgtgtttagtgatgtcctgtttgtagcttgaaatttgccacagtgggtgtgtttacaccacaggaattggcaaacactacatatcaggccttacctcctgctccctactagggtaggttgttttttttttgttgtttttgttttttgtttctttttttttttgagacggagtctcgctctgtcgcccaggctggagtggagtgatgcgatctccgctcactgcaagctccgcctccctggttcacaccattctcctgcctgagcttccagaatagctgggactacaggcgcccgccaccacacccggctaattttttgtatttttagtagagacggggtttcaccgtgttagccaggatggtctcgatctcctgacctcgcaatctgccctcctcggcctcccaaaatgctggcattatgccactgcgcccggcctagggtaggttgttagaaatgtaccagcctgccagtttcagccttgtttgtctttcatcctttttttttttttttttttttttgagacggggtctctctctgttgccccccaggctggagtgcagtggtgtgatcctggctcactgcaacctctgcctcctgggatcaagtgattctcctgcctcagcctcccaagtagctgggattacaggtgcccaccaccacgtccagctaaattttgtatttttagtagagatggggtttcaccacattggccaggctggtatcgaactccttacctaaggtgatccacccgccttggcctcccaaagtgctgggattacaggcgtgagccaccgcactgggcctctttcgttctttcttaatgaaaatcttcctgaaagatttgcctactgatgtctgtgtcaataggtactgcctgcgggacagagcctgccctccttttgaaggtctttctctgtctgggtgaccatctgcatgtcactccctgctgctcagaactaaagatgtagctatgcctggggtaggttgggaaaacctgtgggaatcacagagcttgctgtcatgctgtgttctggatacctgaagcttggcaggcaggtgggatcgagggtgggcattaggaaagtgatgtggctctataggaaggggacataggtcctgagattttaggtccccaattggacaaagctgttttttttttctggataaatgttctagcttattcataatcgagtggtcagttttcttttcttttcttttctttttttttttgagatggagtctcgctctttcgcccaggctggagtgcagtggcgctatctcggctcactgcaagctccgcctcccaggttcacgccattctcccgcctcagcctccggagtagctgggactacaggcgcctgccaccgcgtccggctaattttttgtatttttagtagagacagggtttcaccgtgttagccaggatggtctcgatctcttgacctcgtgatccgcccgcctcggcctcccaaagtgctgggattacaggcgtgagccaccgcgcccggccaagtggtcagttttctcagctgccgggtcttgcacaccttgctggctctggagaccatatgcaccatgtagaccccatttgtttcctaccctcagtgttgggggaggggccaagggcctgtcgatgtgttgacacctggccattcactggccttgaatgtccacattcacctccttgaaatcgatgccccgtatcggaggctccatgtggatttgggggcagaggcctgtactccagatggtggggtggccttcaccaatcaggcagattccctgccctgccctgccctttgggctctgtagctccagatgtgtgctcaagatctgtggccacatggatgggacaagccacagagactcagactccgtggtccctgtgaccagagtagccgtggccctgtctgggaatgttcccaccctgttgctgaaggtgagaaatttctctgtgctggagaacagctgtgctgagaagttggcccatctggcttgcaggactgctggggcaagggaggtctgctgccggtctcttccttcctcctctgactgggtgctccttgtctaggttccttgcagcaaaagaattctctaatttattttgttcccttattgagtctctactccatgaagcccacctcctaatcccagctgactggctcccacctcctcaagaggaaggccaggggcagacgaggctgaaggaggctgactcccctgtgccttcgcagtctgagctgatgctgctgtatgttcacagggctccttcagcttttaaaaaggcttcaacacgttcgtcacacgcttgtggctctcctggatgccacactaactcagtaaggcctgagttagaggctgttcctgaggctgtgaaaatagaagaagggtccagaggagaatcccttcatctgacgatcccaggaaggcttcctagaagaagcagcctctgagctgagacctgaagacagatcaggcctgagtcaggccagggagggtgtgaggggcccaccaggcagagggaacaggatagggcaggcacagaggtctggcacctggcttgtggggaagtgtgagcccctgggcatgaccaaggcggggagaagtggcgtgagaggaggcagatgtggctggcaggagatcggcggccccggccttgctgagctccactctgtatgcaccaggtgacggaggctgcccaggacggtgggcagggaagtgacaggtcacatggtcatcccaccaacagccgggagtccagcttggggggacccaagaccctggggaaggcacgagtcaggggcctgctagagccaggagctagtgggagaaggaaacagtgttgcttatgaattataaacagacactcccgcaactttctctgacgtgatacaatctcaaagtgggccacccagaggtgggaaggtgacttctggctctccaggccttgggcctgtcttttttttttttttttttttttttttgagatggagtctcactctgttgcccaggctggagtgcagtggtgtaatcttggctcactaccacctctgcctcctgcgttcaagcaatcctcctgcctcagcctcctgagtagctgggattacaggcacctgccaccacacccggctaatttttgtatttttagtagagatggtgtttcaccatgttggccaggctggtctcgaattcctgacctcaggtgatccgcccaccttggcctcccaaagtgctgggattacaggcatgagccactgtgcccagccgagcccatcttcaagttctccctggccctcagtgtttctgtattagttcacccttttggctccctgcttttaagagtctcccttaagactgtccccaagtggacaggtccccagaaccaaggagcagccttaggagtccccagttacagacactccagggggtccgtgtggccctcagcctctggcctggttccggcagccttggtcctttgtgctgtctctcacatagcctggccagagctggccaggtcccttggctgggccgagtcatcgtggccagtgactcatgcagggggagaaaagtgaggagggggaacagagtgcgagggggactgtgttaataacaaacccattaggtccctgaggtcacttcacaggagggacaaatggttcatttaggttgatctggctgccggctggcttccagagacactcagggtggggaagatttcattatctggggaaagcaataccagattgtctggaggggcccagccagcgcaccccgcgcttcctgtctgcctcccacgcagagcgttctgttcccaaggcggcaggccaagagcgcgagccgaggctcaggtgcaaagaggggtgcggcatgggggcactgcagggcacggggtgcatgcatttttatttatttttttactgagtgttagggtaatttgttaatggggtatatttggtgacataaaaccttctgtcgattcatggcagtctggaacggagtggaagcgtcccactcctggggaacccccacacacatttggctgtgaacgtcggtgcctttgcactggagcctctttggagtgtgctgggcagagcggagaggttcctcttctctcttctccatcatcctgtggaggtgtcaacatgtagccagagatggtcagtggcagtgaggagaggggggcaggaagagaccagggctgggggcttgccagcccacagttctacccctgaacacccatggcctccctgttcaggtcagcgaggctgggggcagagacgggcaggggtcccccaatgttgggcatctccccgctccctcatactctggatttgccctctggagaaagctctggagcacccagaagtcctggggctgctggctgaggtggggagcagagcccagctgtgcctggaggctccccacttccactcagcttccagggacagtctcagctgtgcaggcccaggccgctgaggctggctccagaaatttcttcacaaccaccactggatggaaaaccagttctctaaagggccccagagccagttttgtttcttcttccacaggttcccatagttagagcatcgggtctttgttagagatgcagaagagacgatgtccccagcccttatgtggttcggtctccactgtggatgttggtgatcttagtctccttctcaaaaccaagagggctgatgccccacattccaggcccccagaaagagccgccacccacccacaccgctacatcttctttccacttttctgttccggaaagagtagagtggatatgcgctcctgtagaaatccatctacagcctgactgcagatgtattttgctcccttattgagtctctgctccatgaagcctgccttgtttgtacctctttctctctctttctctctttcttccctctcttccttcccttccgttcccttcctttttctttccttcctgtcttattctttcctctttctttctttcctctctctctctttccccctttctctgtctttcctatcttttctttctctctctttcctcttttttgaacagccaaagatagaatgaatggcataggtaggtactgagctccctgtaactggaggtgttcaagtgtagggtggatgggcatttatagggcaggcattgaggaaggatctccctgggattgtggatggcaggacaggccctgtggagccttctgagcgggtgcagaagagggagggcatgttcctgctccctgcccttcccgggttgccaggccgccactcccaacctccaccctctttccttccacctgctgggccttacgggatgggcagaggcattgttagaacatggagccgcggtccacagagggccagcagggaggagagctccctggggaccacgtcgcctcagtcactgtggtgactttgaaaataaatgctttcttctctgcttgagtccctgttgttcctgctgacgtggaactagggcaggctggtgactcagccctcatccctgcactgcatcggtggcaagttgcctccagcctcagaccccacagagcagggtgccttcttcagaaaaacagtagggaggccaggacaccaagggccccagggacagcctgtttctcctggctggcacgagttctagccaagcctcctggtaccctgggggtgaggaggtaccagctgtgtgctttagtcactggctgctttgaggctgggtcggtgccaggctggccactccttcttgtcccctagtgtgactttgcagagctcccggaagggtcagagggtttttttccatcactggtgtccatgggatactgtgtccccatctcatttttgtactccagtctcagacgggtgctaggaagttggagactttagccatttcacgactgtgtcttgcggggctggagtaggaacaggagtaggaggaacgctctggtcatgggactgtgtgaagagagaaggatcaggaagaaaacatgagctatcatgtctgggttatacctcagcagagccgctggtggcctcccaggcatctgaatttactaatcacaaagctcaccaggtgtgcaaataaacaaatgctgttcaggaggcacagccagggttctgctggagagggatcatcttggaggggtcatactttccacccagtccttcagtccttctgtcctgtgtgtgtgcagcccctgaccaccaccatccctgcccccgccacttgctcccagggttccatcaggttggatgttattgcaataaaatgtagcaacagaaggtccaggcagtgctgcagtccctggtggtatcatcagagccagcaggcagcagggctggggaactccaagctgattcagtcccaagtgccggagcggggagctcggatgaggtgggggtggggaaccggggagccatggagcagagcatttgctgtgctgaaggccaggagcctccttgggagatcatgaatttagaacactaatactttgtttaaaaagtcccctgccttggagataagagctcaggccgctgtggtcaggttttgctgtaaatgttctgcacaaagcaggctggggggatcactgggaagtctggggaacagattggtcatgtgcttctttgagtgaaaccttatggttgcattgaagcggccaggcagagggtgtgatggggtgtggtagccgcacaccggctcagtcaggctgaatggggaaatgcaaactcaggtggcctgaaagagacttagtggtccacagcctggtggctgctcccagtacaggtgatgtaaagagagaaggggttccgggggcttggcccaggtggaaaccatgcactgtctgtgatcctgggcatgtcgaggctggagcaggtctgcttggtggctggcagaacgcacatgaagaatccatgtgtgttctgaacgtcccctctgcccctttgggctcatgccccatcaggagtctcccgactctgccattctgcaaaggaaactgcgctttgtcattgcacaggatcgaacaggtgtgtgtggagtccctaaagccactgtctcaaggggtctcatgggacaatgggagagttgctgtgatgtttaagactaaagtgatggctgggcgcagtggctcacgtctgtaatcccagcactttgggaggctgaggaggatggatcacttgaggccaggagttcgagactaccctggccaacacggtgaaaccccatctctactaaaaaaacaaaaattagccgggcatggtagcgggtgcctgtaatcccagctactcgggaggctgaggcaggagaattgctccgatctgggaggcggaggttgcagtgagccgagatcacgccactacactacagcccgggcgacagagtgagactgtctaaaataataataatgctaataataaataaaataataataataaaataataaaagcaaggacttgaacaaatatttgcacacccatgtttgtagcagctttactctcaattgctcaaatgtggaaggaatggatatacaaagtgtgtgtacacacagtggaatatcattcagccttcaaaaggaacggaattctgtcactacatgtgaaccttgaataatgaaccttgaagacctcatgctacgtaagcctgtctcacaaggacaaatattgtatgatttcacttatgtgaagtcaaattcatagagaaattggaatgacggttgccagcagctaggggaaggaaggatggggagttattgtttaatgaggacagagtttcagtttgggaagttggaagaagtttcggaggtggatggtgttgatgggtgtacaatgtgaatgtacttaatgtcactaacatggaaacttggttaaaatggtaaatttgtcttttttgtttttgttttttttttttttgagacggagtctcgctctgtcgcccaggctggagtgcactggcgtgatcttggctcactgtaacctccgcctcccaggttcaggcgattctcgtgcctcagcctcccagagagctgggattataggcgtttgccaccacgcccggctgatttttgtatttttagtagagacagggtttcaccatgttggccaggctggtcttgaactcctgacctcaggtgatccacccaccttggccttccaaagtgctgggattacaggcgtgagccatggtggctggccaaaaatggtaaattttatattacatatattttatcacagtaaaaatgcattgctctattagaaaaatgatagatttttacaatatgaattaaattacaagttatgaaggaaaaattaagcaaaacattaaaaaattacttataagtaattatatttaaaacaaaagataataaatacacaactttcatcacctcttaggttttttgcaacatttaactattgtctgtcctgttgcggttatgttcttgaggttgtatttgtatgatagaaacactatattcgtggtgactaaacatctcttctcagtctcacctccaatgatgtcatacagataacttgaaattggccggctgggcacgatggctcatgcctgtaatcccagcactttgggaggccaaggcaggcagatcatctgagttcaaaaccagcctggccagcagggtgaatcctcatctctagtaaaaatacaaaaattagccaggagtggtggcgggtgcctgtaatccgagctacttgggaggctgaggcaggagaatcacttgaacctgggaggtggagtttgcagtgagccaggattgccccactgcactccagaccgggtgacagagtgagaccctgtcaaaaaagaaaagaaaagaaagaaattggccaaggcaggaatattgacaccacaggaataggcaagcgctacaaatcgggaaactgagtgttgttgcttttgctggccccaggtggccggttgttgaccgttaactggcacactactggaggagggaggttcagactgattcgcagagagactagaggtagaaacgcaccatggtttggatgctgagggtgagggaaagagaggagtcaacagtggtgcccggagacttggcttgagcaactaggtggatggtagcaccgtttcctaagatgaggggctgtgggaacttgaggggctgtggaaggctctgccactgacggacccagggctcggcagctctgggaggcctactttgtgtcaggccacgcagagataagaccatctgggccctgcccttgggaagtctctgtctatgaggacacagcctgccacctaatggggtgtcccgtctggagcctcagtgttgctgggagaaagcccctcaccttccttcgctctccgagcctcttttgcttccctgccagctgagcctctccatggaggctgtgcctggaggggggtcatggatatggatgtgtgcgccaaacgctgcttcctcgtggatttcctccccactccgttcccacgctttgtaagcttcatttccccggggcctgacctgtggggtttctctccagacctgctccttcccatttccagaaaggcgtgcaggggtttcctatggctctcttccctgtccccatcccccttcccttgggacagtgatctgctggacgggtgggctacccacagggtttgtgattgcttagacatctttgctgtatgaagctttgacctcaaggcatgatgcagatgggaataaggcacgagtttctcctggctgctgtaacaactgtcgaaactgggtggcttatagcaaggggaatgtgtcctctcacagttctggaggccagaagtctgaaatcaaggtgccagcagggccagcttcctctgaagactccaggggaaaacctttctttgcctcttccagcttctggtggccccaggtgttccttggcctgtggctgcatcactccggtctctgcctctgtcttcacaaggcctttttctgtgtctctgtactttcttttctgtctcttagaaggacacagcattgaatttagggcccaccttatcttgagatccttgcctaaattctttctgcagagacccttaaacagaatcaggtcacatttgaggttccaagtgggcatatctttgttttgggggggatcaccagcccactgtaggtctcgttgtgcactgaagacgcaggcggtccctttggccaggcctgcagtcggtcttgccttcttttgtgaccgtggaagaatgcaccttgctggatgcacaggcctttatagttcttttgttcttgccaaatttcagctcagtttcctctctgctgccggcgtgcatcttctctgcccagtgccccttctgggactgtgtgtccaggccctgaggccctagaaaaggggggtggagggcctcctcactatcctgtagcaatgaggcctcattaaaatcctggagccccagactggacccagcccttagctatgatcaaaggacagctcgggatatgattaaagggctagagaaagatgatttaggctgagaaagaggaggccaaggagcaactggattgtccttgaatgtggaaaaggtaattatgacttgaagggtggtgcccagctgtttcccatctcctctgaggacaggaaaaaaaaggaaataaatgatgtacaattagagcagttggttagatacgagggtgaacttcctggctgggagtatggccaagccctgatttgggtttcctgaaagagctcggggaacctccttacctggaggtttctaggcctggtcatgtggctctgagtgattacattgaaggggcagtggctggggctggagccggtgggctctgagcacagtcacgcaggcatgcgcactttctggctgctctcctgccattgtcccttgggttcccattttggtgaggcgtgcaccctggcggcgctccccagggaactaaatatgtttgctgcactgtgcgtggagatggagaatgtacaattggctgaccctgtgctaatctggtggaactccatgccagccctgggaaagaacaattgcatgggtgtgtccacactcaccaggtgctttttagaaaaacactcgagaataatgctgtggcttaggatggctgttgtgccggacccggcatcttcccaggggggctgtgttgttgggctgagtttcttaggtactggacccccaaatccccaaatacggcgtggacaggtggcccagtaggggctggactatccgataggcccaggtgctggagttcagacaagacataccctggcctggcgtggaagatacggggtgctattaatggcagcaatggctgcatttctgaaacccgggctcccaggccgacgagggtgtgcacgcatctgaaatgtctgtggttttgcagttcccatgtccacaaactcacttggttgaaaatagttcaaaatatccaaagcatgagggagggagtgcctgcttttcttaaaaaggaaggacttgatttcatctacttaaaaagccacccaaacctagaacattttccgcaagagaccccctgccccccgcctctccagaatggctggagagtctcagcactcctgcacatttgggatatttcagagggggtggggaggggcaagtgggcagcgagcgacctcagacccaggatgagctgtcaggcgctccccggccacacattcaagggaccggagtgcagttgtagcgttgcggcctgctgcttcgggggtgggggtgttgttccatgctgtgaattctcacatggcccctgactctgggcagaggccgagggtctaagggacggggtgacagggagagcatgcaggagtgggtttctggctttccagggcgagtggaagaagcgcctctctctcttgtaggtgacagacctggggggcccttcttgaggatgagagcctgttgcttctcaagttctgtgtctaacccaggtccccaggtctaccccagcccctcggccctgcctgccttgtggatgatatagtttaagggtagagaccgctggcctggagggaaggctaggcctcaggttagggcccagaagggagggagaagcccttggggcagctccctttctgctcactcactgcctagctccttccttcacaccttccttcggaaacgtctgctcctgacaaggtctacttcctgctctcaggaggcccttattgtggaggaagggaggcgtcgcccgtccctggcttctctgacagccgtgttccatccccgccctgtgccccttctcccggacagtgccttctccagggctcacccaggagggtgcagcggtggcccccggggcggtggtcgtggtgggggtgttagctgcaggggtgccctcggtgggtgggagttggtggcctctcgctggtgccatgggactcgcatgttcgccctgcgcccctcggctcttgagcccacaggccgggatcctgcctgccagccgcgtgcgctgccgtttaacccttgcaggcgcagagcgcgcggcggcggtgacagagaactttgtttggctgcccaaatacagcctcctgcagaaggaccctgcgcccggggaaggggaggaatctcttcccctctgggcgcccgccctcctcgccatggcccggcctccacatccgcccacatctggccgcagcggggcgcccggggggaggggctgaggccgcgtctctcgccgtcccctgggcgcgggccaggcggggaggaggggggcgctccggtcgtgtgcccaggactgtcccccagcggccactcgggccccagccccccaggcctggccttgacaggcgggcggagcagccagtgcgagacagggaggccggtgcgggtgcgggaacctgatccgcccgggaggcgggggcggggcgggggcgcagcgcgcgaggaggggccgtcgcccgccttcctcccccattcattcagctgagccagggggcctaggggctcctccggcggctagctctgcactgcaggagcgcgggcgcggcgccccagccagcgcgcagggcccgggccccgccgggggcgcttcctcgccgctgccctccgcgcgacccgctgcccaccagccaccatgtcggaccccgcggtcaacgcgcagctggatgggatcatttcggacttcgaaggtgggtgctgggctggctgctgcggccgcggacgtgctggagaggaccctgcgggtgggcctggcgcgggacgggggtgcgctgaggggagacgggagtgcgctgaggggagacgggacccctaatccaggcgccctcccgctgagagcgccgcgcgcccccggccccgtgcccgcgccgcctacgtgggggaccctgttaggggcacccgcgtagaccctgcgcgccctcacaggaccctgtgctcgttctgcgcactgccgcctgggtttccttccttttattgttgtttgtgtttgccaagcgacagcgacctcctcgagggctcgcgaggctgcctcggaactctccaggacgcacagtttcactctgggaaatccatcggtcccctccctttggctctccccggcggctctcgggccccgcttggacccggcaacgggatagggaggtcgttcctcacctccgactgagtggacagccgcgtcctgctcgggtggacagccctcccctcccccacgccagtttcggggccgccaagttgtgcagcccgtgggccgggagcaccgaacggacacagcccaggtcgtggcagggtctagagtgggatgtcccatggcccccatccaggcctggggatatcctcatccgcctcccagaatcgggccgtgggggacagaaggggcctgcgtgcgggcagggagagtattttggctctctcctgtcttcggggtttacaaagtgtgttgggacttgcggggctgctctgtccaagcctgggtctggcgtccgcgtctctgagcctgtgagtgcgtgcgctttcctgcgtcctcgtgactgccggtgctggggctctgcgtcctgcgtccgcgggagtaaatacagcaggcgaaggggaagctcacacaatggtctccagcgctctggggcagggcttctgaggggcgggcctgcctctgccgggacctggagcccccgcccctcggagaggctcctaggctgacttgggcagagccctctggtgggccgggagggggaaaggctgtgttgaaatgagcaaactgtccaggtgtcaggccaagctgggaggtgaccagcctgaggtcctccccgctccatggccagaaccagggctgacatctgggtgtcctgagcccagctgcccacacggcccacctggggtcagccctatctgagtgggggaggcggggcctcctgggggaccagaactttggctggacgccaagcagagtgccagtggctgttcttcagggctgggcctgaggagggtgtggggcggcgaagggacgggagggggttgtgatccagtggccactggcgctgtgcagagtgtgagctggaaacatcgtagttactttgtcagcttagtggtgaaagccctttttcaggctctatccctttgcatccctgcttcccagagggaggggaggtctgggtctgcagagctgggagggcttgctgttcccgcccccctcccccacaacacctcctcatctggacatctttgggcacatgctcatactggggtctccctaggtccactgtgttccgttgagcctcctgcagtccccgagtgaatgtgacctccctgcccctgcctctttgcaactcttccctgcgaccgctcctccaggggccttccttgtcccaaatgtccaagtggcacgacttagccggtctgaccactttccagtaagcccttatggagagaggccctgtgttgtgcagagctctcctcctgcctgcgggatcgaggtctctgctctcagttcctaacagaaagtgtcgggcccccagtgggatttctggggaagaactctcgtgtctcaacgggagccctgtggcgggaggggaggccagggtttggggttgtgttcgttgtacagctgtcaccatttgcactatgaaagttgttagtgccccttccttgggtctctgggtgtaactccacccttgcccccatgtgcctccatctggagctgcttctgcggctgtctcccaagccagttttgtgaccctgtaatttagtccaagacaatgggctcattgagaccatcctggtgcagcagttggcaatcctttggctctgggggaaggtttctcagtctcggggagtggggcctcaatctgctggttccctgtgtttatcagtctcccccttgtgtgccctgaatggttttgctgggaattctggtcttagagccatcaggtggcccgagtcgataggcgtgagagagtgtgtgtgtgcatgagtgcgcatgtgcatgggggctgacctggggtatggaaaggtggccctccctggtgcccaaggagcctggagtatagttggagggtgtgggggtgtgtatatgggagttggacaaccttgggtggacagacagacgtggggaagggatgattgaaggaggtggaggagagagtgtgattcagcccagccaggggtgatgtggacaggcagcttccgaatcagggtagagaaaagtcaccactagctagcaggggagaagtcagtatggaggaggcggaccttgagggagagtaggaattggattgcaagaggaaggagagccttctggccagcagcagccagcagcagtgggggaggctggaatgagctggctggagagggggctggggcataaggaggggcctgcctgtgaagatcatatgggccaggctgtggagggccaggcatgcccgccgggagtgcagctggtccacgggaagcatctggagtggctgggaatgggcgcaggagcagcgccgtgggagcacaggtctctttcccggggcggctcacctggtgtcttggttcctgcaaggtaggccgaaagggtggggaggaaactgccagctccttacagcgctgggatggtggccccagggttcctgaggccagcggatgtgggtgcctgtcaccatgtgggttgctgaggggcggagactccaggggccaccccaaagcaggacgagctctgagccacggcatctctgggggcagttttccaatcgagcagacgtctaggcctggaatcctgtaacagaggccacagggccctgatcagggtgttctgggaggcttagaactagtggcagtatacagggtagacggcaagtgacctggcatggggaaagaggcaggtgcccaggccggcacagcacacccgtaaggaacaggtagacgggaagccgtccgtgggcctgtgtgtgtgctcggagttaaaattctgccaatgtcccatgtcctgggcacatctaccccctccctggggagcacctttctcttcaccttttccttccccgcctgtccccttcacccagggccttccccatccctcccgtcttggggaccgagggcaccatggctttatgttccatcaccgatgagttgcacagggattcagtccttccgctgttcaggccgggtccttcaggctcagggttcccaggaatggagagggtatcagtgtcttccatggactcaaacttcccgcatcccgcctttgctcccccttcaagataggtctccgagcttcaaggtcttagggctctgtggaggccgccacgtagcagcaaggagaatgttttgtatttggctgatgagatttttagagtctcattttctacttttccactgtacaaacgggcctccaggcgactgcagcacccgccactgcccgtaatagggtgacaagagggatgaccctttcctctttctcccttctggttggtggaggcacggggctggcggacggcatgtgctttcgtgaattcaggccaaatctgttatcgcaaacacgattacaactcgggtctttgtgtaacaaaagcctttccaagtaccagctgttggcctgctttgctcagcggtgtttgctgtaaccagatttgcacaccgagaaagaatccaaaagtccttgatgtttgttgaaacaatctggcccaggacccacgtgctcagatcccagagctgtgtggcatctgagcttctcccgagcccccactgtcgcccgaggaggacccccagatctgtgttctggaggcagagcaggctgtgggacgggcttctgggtgggaaggaccatgtggatatgccttcttgtctgagagtcccaacacctccgggacgtgggagctggcgcgctggcaggattcaggtgcctctttcctctctagagaaaaaggccccgttgcttggtaataggtgcagacctgtccctaattaatgccagtaggcctcttgcgtgatgaaccctgcctttcagccaagactcaaggcatcctgtgaatactgcctctctgcagtttgagcttttgtggtgggaggcaggagccatggggagtgggggcaggcctcttacacgggtcccacagccactggcagcactgacttgatgctctttgagttcagagcccagggccagacagacccactgtcccgactacgagttggttcatttagaggggggcggacacagcacccaggcagcagatgcactgtgatcagccttgcagcggggctgtgggttctctgggctggatgtccgggaagaggcaggtggaggtaaacgccaggacacccctgcagtgactgggtgactgcaggctggaaatgctttctgtgggctgtggctgtccaggaaggttttgaatggggctagtggacagagtttgcatccagaggggcagtgctttggaggagtgaggggtatggcagtgtagggatgcccaggccgccctcactctgccattggaaagctgggcggcttcggtttcttcagtttcttcgcctgtttccctgcctgcaaagtggggttagaaacagctctctttgagggttgctgggggactctgagatgcagcccatggcgctgagcacgggtcctgcctcctacgggtgtggtgggtgtcgcggctggtgtggcatctgggcgggaaaagggggcatttgcaaaggacaggtaggtttggatgcttaaatatgcagatctggggatgggaggtctcaggcaagggcctgtgtgatgccactgtatgaatgaggccggacagcatggtcaccactaattatggaaagcacggcagacactagtgccagtagcgcccgcctgggggtccctctgagcccgacaggtactcaggctcccagtgcagccatgggaccccccttttcctgcctggctgacattctggaggctggcgtcatgttggctgcaggttcctcttactgggaggttgtcctggtcttccctgccaccatctacccccacccccaccctggagtgtcacagatgggtggaccatatgcccatctgcagggccaagcgctgacaatgaggtgagcacttgctggatgaccggaccatgaggacagcgggggcgctggcagcctgcgttcggctctgcaggctggcctttccctgaaaagcggttgtggcagagtgtgcatcccagggagtggtgcctgctgccctgaacattctcatccagcaggcctctgcaagggcccagtcaagtgtggtgcagagctgggctggcagctggaacagtctcatcttgtctagtggtgagaccaagggctgatgggccaaggctgcgtgctgcttgcccagcccgtggacccatccactgagcacccccatacccctacactgggcccggggtgtcaggaggtggaggggggactgggtgcctggaaaaacaagcccaccgagagcctgagcccccaggggtcagtatcaggcagtcaccacggtgcccggtacacagtggccacctggtctcgtcggctgtcttggtggtggagagcgtgcatggtggccgtacgtgatgggcatcacccagggtaatacagatatgcagactgtgcatttgtctgtaggagccagggacttctcagcctggcaacctgtgacctctgcctacccgttgggagagaggtgctgttccctgatagcctggtgccgggagagcagaactagggtctcctcctcctttctccacctcccatttcttacatgcccaggcatcaggggaggtcacactcagggatgagtcttggccactgggttcagggcctcactgttgccatctcttccctttgccagccagccaaatgcccgtccatcatcgtgccggggatggggctggcctgctcctctgaagtctccttggtgtatagcctaggctggagccccggacgattccgccaccccctcccccgactttttctttttattttgattcatcccagaaacccagccaaaaaccaagttcctgtgctctcccttgacaaagccactgaggaaaaatggtcaaacactgcctttctttccaaagccctcttggtttttcccaaatttggaggctctgagttgcttatgagaccaaagggtccggaactctctggaacacagtcccagaagtgggaggatttgtcatctctccagccaaacagacccaccagttggcccctagacacccccaggcgcctggggcatttctgggctcaggctgtttaatttggtctgcagagccccgaggctccgtttagactgggccagcagacagttctagagacttcaagtttgttgtcgtttttaaaagtcctgccaatgcccagaaacttagagggacaagaagatgacctcgatgtcagccgggaccataaacagtgaggcccgccccccccccccgcatgcccgcctccccctccatgcccgcctccccctccatgcccgctcccccccatgcccgcccccccccaccccatgcctgcctccactgctcccgtagctgggtctccaggggattgcccgtggccatgggggaggccgggaatgcggggctcagactctactgggcttcttgtatttttttgtttttccttgtccatcttctttctcggaaatttctgaatatccccctacagcctttggcattctgtcactcctggcatctctgggccaactgggaaagccatcatttgtccaatatccagaaaatcaaggggcctggccttaaatacattgcagtgccctcctccccacatggcatcgaatttcctgtgtcctcaaagccaggagcctgtgccttggatgtgggcgatggagccttgcagacacctggagcggctttcctgggagagtctccctcgccttcccatccacccgcttcccctcccctgccccaagctctggtcacagcctcggaggggtcatctgagtgtaggttgcctccaggtgtacagttggaggggggcagttaccccacatccccctgtctgctaggggcacccccagggactcaggtcttgagggacagcggaagggtggggtggggagtaggccgttgtctcgtgccacctgggtgttatgtagactctgaatgggcagttcctgggagctggtttttccttctcaccccttctacagtgctgcccctctgaggggctggagctctctggagccctttgcagcctgtggcaggtctttctgattctgtgcctggtttcgcagcctccaacccatagccagtggcatgaagaacattcctggctgtctctacctgtggcctttgcaggcagcagttccctggggcagggcctgggggtcctggcacctccttgtgggaccccttgggtatgagggagggagccacctgggccacagatagacccccttcctgtatccaggaggttcaggatggacctgtctcatctttctttttggtgggaagagagcattcctggccatggggaatgtggcctggacagagccacctagcctctcccctcccccaggcagggccctgaaagatggagatggctctgctcctgccaggtcaacagccagcagtctggtggatttccatgcagtccaggcaggatctccttctgtccccaccccccaccccatgtgcaggaagctggttccaagcagggacccttggccccgctttccacgtgggtgggcagtttccctgcgaggggcaggccaggcccctgccctatgtcccccagagaccgatgttatctacagtaagagcatacaagtctttttggctccaaaccaggcctggaggggtggtcttctcctctgtcctctgcctcttgccccccattaaaggtcagggaatggagtgctctgtatgtttgctggggttgggttttttcctttggtttaaaatgaagggctggaatccctggtgcagactgcacggtgagaggtgctccttgggatccactcgaggagcattactgctgaatgccctgccaggccaggagcatcgctgggggtgggagaggcagttggcttatttgtttatccaacagccatccatgggtaccccaagggccagctctgttctaggcactgggggtctaggcatgggctcaggagaaggggtagaacgggagggcttcctggaggaaggcttcctaaccagagaccggggtaggagtttgccaggcaggtgatgctggccagcttctcttgccattttccttttctttttttctttttctttctttctttttttttgagacagagtttcgctcttgttgcccaggctgcagtgcagtggcgtgatctcggctcactgcatcctccgcctcctgggttcaagcgattctcctgcctcagcctcctgagtagctgagactccaggcacgcaccaccacgcccagctaattttttgtatttttagtagagacaaggtttcatcctgttggccaggctggtctcaaactccttacctcaggtgatccgcccaccttggcttcccaaagtgctgggattacaggtgtgagccactgcgctcggccttctcttgccatttctgcagactcatagtgtgtgtggaagactgtatgtctgtgcctggcacagctgccctcggcactcaggtgggaggtgggggagagggctgttggtgccagcacaggtcatggcatgagacaggctcccgcagccaagcggggtgcaccgcagcattggaggggccctgctgcgcacgagatccaggctctgcatctgtcctcctccccaggaggcctggagggctgggagggaccagggtggtgaaataacccaggtgggagagaggcactgttggagaggcagagggagctgcaggtttgtagcagcgagctttaaaccctgggcctccaccagaaaacctcagaaagggctgctttgcttttttttctaaactacaaaagaaacccttggccgcctgggccccttggggtcgggtgggggaggagatccttcattcgcacctttgcaggcccagtactgtgcagagggaggagggtggaggcaaaggcgagggaggagggtggaagcaaaggcggggtccctccctagcccccctgccctgcctggttgctgctctcagacccctactcctggcccggaaacatggaatcttgggacagctggggtagggggcacagaacggagaccctggtgagggaggaactctttctccagccctggctgtggccacagcaaggccaggctgggaggacctcactcaaatatttacatctctcctaatatttaaatgatgaagcaggctcctgcacacagctgccctggagccagctgttgcctgccctaccctccctctctccctccctctttctttccctccctctttctctccctccctccttctctccctccctccttccctgcattctttgtctctgacccaagtccaggcccttccagctgttctctccttacccacaggcacctcctgtgactgagcttctccttgttatttttcataaccatttcctttaattgagcacctcctaggtgccaggccctgggctggtactttgtatacaaggtgtcttttaatccccacgagagcccaacaaggtagattgggctgctgaggctccagcgctggaaggccggcccgggtcctcccagtccgcacctgcatccatccatcactcccccactgtggagacctgttccctggcccctggctgagcacgatggaaatctctgtctactagtccttggagagtggggatggctgagggtcccgaccctggggtctgacgggggctgcctctgccccacttcagcctggctgctcttccactcaatgactgagtttgcaaaaccagaataacagtgctacctggctggtactttgggtggctgggaggcgtgggagagggtgcacggaggggctgagcgaggtgtcagcatcgtggggatctccgagggtagccttcccaggcccagggcggagtgtaggcagagggcgcgatggcccagcgtgccggctcacatctggccttgcccttgcccacacggcaatgtgggggagtcatcagcctctcagtgcctcagtttcccatctgtgcaatggggacaagagtaaatcactgtcttcaggtatggtaagcactcatacacattgactattgcagaatgaacacagtgagcccttcttaggcttctactacatgccaggcagggtgccaggccctagtggagaggggacaatgatgggcaagctggctcctgccctcaagggctgtcgagcagggaggaaggcgccggctgccctgactgtgacccggagtggggtgattcgcaaagaggctggcgggaggctggctgggggctggctgggggctgctccctctcctgcctgtgttccgtggcagggtattaaactggcttttttcatggatttccgaggccctgactgtgggacctcgggcaggttttgggaccttgtgactttgttcccgcttgtcattcaggcctttgtcctcagcagtgcccagcacacggcgacttctgcatgtccttcagtgtgtgactgaccctggagctgagacttggcagctgaggctggacattgtccttggataactcccggggaggtgggggcagggtggggctgtgagctggcaactccgagtccctagcagcctccgaatggaggctttcctcttgtaggattctcggggaggaaggaggggatgggggagatgaggcttgtgagtcttcaggagggcagaggttcacacctgcagcgccccagaaacactccggggtgcccaggcttacccagccctcctgagccagaaccaccaagagttggggaccagcagtccattttttagcaagatccagaaatgattctcctgaacagtccgagccaagaatgacatatctggaatcagaacatcagaactacagaggaatcgagagaacgggcccaaaatgtgtagggacctcagccacatggcgccacatggaggaaagcacccaacatcatcactgtatgaacctgtttaaacacacacacacacacacacacacacacacacacacacacacacactccccagtaaagagtggaaagacatttgtcagaatattgatggaagttacctgggttgtgggtttatagattttttccctttgtttttgtgcattttgcaaattttcggctttgtgcctaaattccttttacagtcaggaacaaagcaatagatgttattttttaaagttcatgggctcgtgcccgtaatcccaacactctgggaggctgaggcaggaggattccttaagcccaggagtttgagaccagcctgggcaacatagggagacccccacctttttttttttttttttttgacagagtttcactgtgtcccaggctgaagtggcggtggcacgttcttggttcactgcaacctctgcctcccaggttcaggtgattctcatgcctcagcctcctgagtagctggattacagacactcatatttgtaggatttgagaatcctacaagaggaaagcctccattcggaggctgctggggacttggagttgccagctcacatattttttagtagagacagggtttcaccatgttgaccaggctggtctcaaactcctgtcctcaagtgatccatccatctcggcctcccaaggttccaggattacaggcgtgagccactgcgcccggccatgggagaccccctcttaaaacaagaataaaaataaaaataaataaaagtttactgtcaaaaagaaaaacacatcacccaacctaatctccccctaggattgagagatgaggaagcagaggccggaaagtgtcacattccctggtcgctggcagtcaggggacctgaggcctgggctggttttctcgtgctccaggcctggggtgtcaggtggagcccctgctttgcccaaaggtctaggtgcctctgccagcactgcttgcttctgcatttttggccacaaggaatgtgggccaaaggcagggtccttgacctctgcccaggagggtgaagtgggctggtcctccttgtccctgctccaaggcccctgcggctgtgcctttggaaattgctggcccgagctagtgtgcggagctgggacagacctcaccgtggccctcgtggggtcattccatgtccgggctggaagggatctttcggtccagcccttcctgttcctcatcaggaaactgagaccagagaggtcatctgcctggcccggggtggggtgtagatggcgcttgtgactcctgcatgccacgtgcagacagtccctcagctgtgggcttcccacgcaagcagccatgctggggataacttggctgaaacctgcgatttaatgaagagaagaatgactcctcctgcagccctgtgccccacaggctccctcctgcccccacccctcctgcagaggggcctcatgctggtgggtgggtccctgttgctgcaatgggcccaggcagtttctgggcagtggaggcttggctgtcttcctgcccaatgtcccctgtagcccacgctgtccgggaagggcggggaagcactcagccactggggacttcacaagatgggtatctgggagatgctgattggcaggccaggctcccgtggcccacaggcaggtcagaggtcacagtgctgagctgggctgagttggcagctcagggcagtgggggtgggggtaccttgctcagccatgggcctctctggcacaagggtttggagtttactgtaaacaactccttcagtttttccttctctcataggccaccagcagaattgaggggccctctgttgatgaggtgtggcctgggaggggctagttgtctgtccacctgatccttgcggacaggtgaccacaggcttcctgccccagggggctgggggaaagatcggggaggcctctctggcttccccacttggaaggaaaatacgggcataggggagacactttacagggacacatttcagccagtaccctctggctgtgctgggggcacagtgcctgccctgcccacaagaggggtcagttctctccaggatttaacttcagccttcagtgcagggcagatgagcactcagaggcccagaggactcatatcacgagagagaagctgtgaccgcacaggcactgaaggttaaacagaagagtgggacacacgggtgacctgaaagtcccagggtcagtgtggttagccccagatagctggggagctttgggtaccaggcttagcaggggaggagggcccccgtgacagtttgctggggctgctgcaacaaagccccacgaactttgggggctgaagatggttctagaggccagaagtccaaaatcaaggtgtcgaccaggctgatcctttggggcctctgcgggaggctccggcccaggcctctctcccagcttctggtggctcccgggtgctcctgggcatgtagatgcgtcacgccactccctgctccgtcttcacatggccttttctctgtgtctctgtgtctcgtaaggatgcttgtcattgcatttagagcccaccctaaatccaggatactctcctcttgagatcctttattgcatctgcaaagaccctattccaactcctgtcacattcacaggtccgagggctagggctctggcatgtcttttgggggtcactattcagtccactgcggcagctgatcttaggggaagcagaatgttctaagcttggggtgagcggagggaacgctgctgggtggggagtgggagaccaggctcggagacaccgcggatctcctctgtctgatgagggcgtgatgaggttctcatctcaggtcctctgaatggcggctgcttctgaggagaccctttcccctggatctgcccctccagaaacctccacttaggtccaggtcccaaggtggatggtaagaggcggctgtccctgccacacttgatgggtgagtgtgtgaacggggctgggagcaggacacttgtcacttctgtggacagattccagaggctcatgaatctgctgctggggaaggtgcctgatctagcctgaccctccacccccacctcccccttcccgccccccttcaccagccctgttcccagagcttcacttccccaaaggcaggcgccgtttcctggacttctcagcagctaccccctaccccagacccctctcttgtaggcccctctggtctcagcgcctactcctccctgggcttctgcccctctaccgtgaggcttctgggcagaagtgtggggccccctcgctgtgtctggctctcgcggtataccaggggtcctcccaggggcccgccctgcccgctaggtttccagggagcttttcaagttcttagatgggcttgatggagtttcccaatgcgttgtctcagagcaggaggggccccggctgagtccgagagtcccctcagtcacaccctgggctgtttggggcagccaggcagcccgtcttctggaggtgctgcctctctctggttaccccttctggaatcttctgcgtccagttgcggcccctcctacacagcacacccaccacccccttttacctgtgactcttctttgtcaacctcttcatgtctttgagaatggagaccaggtcctcctcaccctggagttcagcagaacctaaaccaggcagatccgtgtaggttcacgtgggggctctgtggccactgtggctctgccgtcacctccagcccagcttggcgcgctttggatcatgtcattcagtgccggtcctccaaacctctcccctggctctgcaggcctgggaagcagctggctcctgggtgcagctgtgaccggagcctgaactctgctccctggggtcaccgtcccctgtaattaggctgcagctcatattggctcgggcagaggccatcggctgcccgccttggggccacaacacagagagccccgtgattaatggaggctccacctgggccaagtggcccctggtgttaggcgcttttttttttttttttttttttttgcattttttaagtgcttgtaacatttcccctaatggacaatgagacgaggagggagggaggggtggcttctctgcccaggcagatcaggaatggtcaccgcctgtgtgtgcagtgacaggtctgggaacagacaagggagagcttgtccgggaggctggaccctcacaccgatgctgcctgtgcctggcagctctgtcccgggcctcagaacagacactgaccaacacgctcctcagggtctccaggtccgggtcctggtccccggcagagcttcccatccatgggaagaagcaccgagcagccttgctggctcctcgcagggagctgggatgcatttctaagagcagcatgcgtgaagcccggggtctgggcaaaggagtgtttggggaagagtctgctgttgttggagggtcggaagtagaggggaaggaggggcacgcggtaggctgaggaggtggctggcgaccctgtggtggggacgagggggctatgagcagaccaggagccagcatcacgtttctctgtctccagaatcgaggacggagagctgccagagaggccctggcggggtgtctggggccacctaaagggcgtgggtggattaaagctgaggaaagcctcattttgggggactccgtacttaacctttgaggccctcagagctgcagcctgtggtttttcgaagtcaatcacctcccagggcctcgctcctgccttcagcgacagccatttatcagggagtctttgacccaaggagacctgaaaggtcatctggtccctctcctacccccaggcaggccacacctagaccctcccacacagatccgtcccacccttctgctgccttccaccagggacggagggtgggcggccctcccacccaggccctggcggccccaccccagccaggaaattcttcctctttatctgcctcacatctcttcccctgcggcttccgcccatttcccctcaatctgctcctagtggagcagccagcagctggtttagaacccgggggtggggggagcgctagaccagtgcagcacatctgagagtgtgccagaggtgctcccattcccatagctgatttagtaaagaaaagaggaagtccagcaacttagcgccactttaaagtccgcctggaatgaccctgtggctgccggaaccaggggcacgcggtagatgacgggagcaggcacagagaggccttcgtcccggatcagtcgctgttgccctcttggaggctgggctgcctttcaagaagaggacccaaggccctgtgagcggtggcctcctctggagcctttactgtggtcctggttctgctctgcgtaaagagagatggcttgaagcagaagctgctacgtggctgtcccaggcaggcgcccgtagtcccagctactcgggaggcggaggcaggagaatggcatgaacccgggaggcggagcttgcagtgagcagagatggcaccactgcaccgcagcctgggcgacagagcaagactccgtcttaaaaaaaaaaaaaaaaaaaaggagtagagaaatctttcccagaaggcctgcagtcacctccccttcatgtttcagaggtaaaaaaaaaaaaaactgcacatttcgctttttttttttttttttgagacggagtctcgctctgtcgcccaggctggagtgcaggggcgcgatctcggctcgctgcaagctccgcctcccgggttcacgccattctcctgcctcagcctcccgagtagctgggactacaggcgcccgccaccacgcccggctaattttttgtgtttttagtagagacggggtttcactgtgttagccaggatggtctcgatctcctgacctcgtgatctgcccgcctctgcctcccaaagtgctgggattacaggcgtgagccgccgcgcccggccacacgtttctgttcttgaacaggtggctccctgaccctgggtgtggttactccaagaccttgctctggtggggcacgattctggccccaggtagggcgaccgtataacttactgtcccttgggggacacgttagtgaaagggacccttgaatgactacggtgggacaacagatgtgagctgggtttgtcccaggaaggctggatgtatgggcctcttgagccagaggagacaacagcagaaagctctgcggctgatgggaccgagcaggagaagggccggcggaggctggggcaacaacgcacttgcccactgtgaagggcctgtgtgagctgatggctgatgagagggcagtggggcgaggctgcctcctgccaggctagaccagctccaggacacccatatctccttttcagaaccggtgactcagtggctagaaggggcttcagaattgacgggacactgagggagtcgaatggaatggctggagtggccacagcaggctctaggcctcctcccgtttcttttctgtgttctgttcctggggtctatatcctggggttgctgtaacagagtgccacaacctgggggcttacaaacatagcttccggcggctcctggagattcctggcgttccttggcctgcagacgcatcaccatcatctctgatctctggcccctgtctccacgtggctttctccccctgtctgtgtgtctttctccttttctgtcttttataaagatgctcaccattggatttagggcccactaaattcagaatgatctcaccttgagacccttaccttaattacatctgcaaagatccgttttccaaatgtgatcatgttcgcaggttccaggagttaggacttaagacatatcgttttgggggacactgttgaacccactacatttaataaacccagagttggtgccaatgtcccctgcggacaccatagcagattctggaggttccttgtaaaggaatccgtaggacttcttttcccttctggagggatgagactgtagctgggctggggaaagctgctggttcaagctggggctggttcagctggtgctggcttgccaggttgttagagagctttatccagggagaaattaacatcacaaagttgggggataagagaaggtttggaatcccaagggctggctgttgaggtcagctgcccacccctttgtgttccatcttacagggacccaggcctgccagtgctccgtttctggaaggaatgctgtgggctgctgtgccccataggcagggtggagggtccccttgcagccagcgagctgctcttcctgtagcgtgcagagggaaggaggaggcttgtttatttctcttggcctcagccgaaaatccaaccacaggctctggcactaggcagacctgctcattctcacatcatcattgcagagtgagccaggcctcttgggtggggctgtgatgagcaggaaggacctccggagtgcctgggacttcttgggcccagggttgccagaggcagagagaaagaagcctcctcctaacacttgagcaaagatagtcatcagaatccatcagagtggcctcctgtggctcttccctgggtgctgacccccctggtgcatttgaagttttcagggatactattgacgctccctgcacctccatccaggggttagtggaaatggttcttttcctccttgtccagaggtactgtggatgatgaccccaggtcccagacctcagtcattgggccacgtgtgcagataagcctgggcagtcagtaacctttggccaccaagctggcctcctgcggactgggccggcactggaggcgggtcttagctgctagcactgtggcccagccaggcctggccttgggaaggcagagggggaggggactgggaaagggattgagctgggggtggggtggtaccctggttcttccctcccagacctttggcaggtttgaactatctggctgcggctctctaaggagggagcgcctcctccgccttgatgtggactttgccttctgttcacgttgtccctgtccctaaacaaatgtggctctctgtggggagcctgggggccgccctccactgacactgctgtttcctggcttccctttgcaggctccgctcagcttcactgcgcctatttttaagcctttccttttggacggttttgcttcctgagaacacacccctccccatcaccccaactgtgtcctcctccctatccggagcctgctccacctgccccaggagccacctccctcctccaccaagcagcccaggccaattctggagggctaatttgtgtccctccagaagcaggtcctgagacagggatttcagtgggaggggacaccaggggatgcctgagtgtgggaatgggccaggcagggaatccagccaataaagggtgcctcaccagctcattgtgaccacaggtggctgcccagcccccataccgggcagcatggggagactgcagaccgtgcccccagccttgtcccacctggggttgggtaagggagctggggtttttatacttcagttcttggccaaggactgcactgctcactccttccagccttccgagggcttgggcactaggaaaggctctgggtggagacacggaaataggccatgtgaagtcagtgggcgtgattggtagcagtaaggccaggacagccttggtcaccagcaaggtgaccacacatttcagcatgcacagcccccacagacacacacccaggagatggtaattacaccagcaacagtcacccctgccgcgtgccatgcctgcacccagggaatcttattttttatttatttatttatttttatttgagatggagttgcgctcttgttgcccaggatagagtgcaatggcacaatctcggctcaccacaacctccgcctcctgggttcaagctattctgcctcagcctcccgagtagctgggattacaggcatgcaccaccacgcctgactatttttgtatttttagtagagatggggtttctccattttggtcaggctggtctcgaactcctgacctcaggtgatccacccacctcagcctcccaaagtgttaggattacaggcatgagccaccgcgcctggcctcaggggcaccttattaccccatcacctcctacagcaggtgacactgaggacactgaggctcagagtagactgtggttatgtcactctcctgtttggttctcctgctctcagccctgaaataaagagcacggtccctgtgcaggcccatacgtcctgtctccagccctggagcagtccttaagctccttgaaggcacaccaggcctttgggcctcgtcccccaagtcctggataaataggaggtgaaggagcctttgcaactggaccccactctgccagcgccaaggccctgcctgactacccaccccaccctacacagatcagggacctgtgccaaggtccagtgtcacaggagagtgaagacaaggaggtgcccatggcgtacatgctgctggactcactctgtagatcctaagggttatggggagttatctgccaggtgaggttttcccgtggctttttcctgcaggctcagggtagcatacagggaggtgcttccctactccttggcaccatctgtccggcttccctgagccctgaccctggctcctagatagccagtgtttcttcagggacagaacctgctttgctgctgctcagaggagacccagtttgaccagggctagcgttcctggaacctgagcctggaattccaccctgccctgggcagaggccacgttgctccctcctacgagagctgagctgcgcatgagattattctgaccttgggctctaccatttctttgcatgacatttgtcccaggctggagcagggctctgtggctcgcttggtgttccctccccagactgaggcctgatatgtacaccaggaagtgcttgatctggtttcaggagctgggagcggtttgccaggcagcctgtggtcagagcaggggccttaacaatggtcccttgtgcggcacattcctctctaaacaggcccaggtccaggctgctcctgtttcgaccccgccatgggcctggaggggaaagtttgcatctggagggtggcccactgtggcctctttttgtgtagcagctgagaccgtaggtgcttgagaataggagaagccctgtgcccatcctgggctgtgagatgtttttccagaggtggggatggggatgggccagcatgcagttacccacaccctccagcttgttggcatcaaggtctgtgtatgtgtgtgtttttttttttttaattttgtttttccaacatggagtcttgccatttgcccaggctggtctcggactcctggctcaagcgatcctctagcctcaggttcccaaagtgctgggattataggtgtgagccaccatgcccagccagtaccaaggtgtgttttttaagagcaatattggccgggtgcagtggctcacgcctgtaatcgcagcactttgggaggccgaggcaggcggatcatgaggtcagcagattgagaccatcctggctaacacggtgaaatcgtgtctctactaaaaatacaaaaaaattagccagacgtggtggccgggcacctgtagtcccagctactcgggaggctgaggcaggagaatggcgtgaacctgggaggtggagcttgcggtgagccgagattgcgccactgcactccagtctgggcgacagagcgagactgtctcaaaaaaaaaaaaaaaaaagaacaatatcgatggttttattccctgaacatgctaagtgatccccatgtagtataagcatctcagaaggcaggaaaatgtaatgaacaacacccaccgccattcattccatccagagatcgttattttctgcccgggtgtgagtgtgtgtgtgcgtgcaaactgcacatgtgtgtatgaaatggaattaggatctttgtatacatcttgtgtcctgctatttttacttaatattctcggcatttctcatcttcaaaaatgtgattttaatgatggtgcaggcctttgacatatgggtttagaaaatctgcggaaacccggactgtttccaggttttgtcagtttaatgctgatgcaaatgtcctcgtacgtaaatctttctgtacttctgattatttccttgggataaattcccagaagtgggccaaagcacatgaacggtcttcaggcttttggagcaagttgagatcggtggggattggagaagggacccagggaggcttttgggagcttgcgagattggagtctggctttaggggacttgaattcacagatgaaggagatggctggcaaaggtgggaacctcctgctctatgggtgggggggtgacactgctttaccttccagtgacagcatggggatcctcccaacatgacctggctccgcatctttctgacactgtgcacggtccacagttgtgatgctcagctgggagcctcttctgtgtccttcagttgcattaactccttgcagacagaggaggaagctgtccggtgctcctccctgctgcgtgggtcctttgaatctgcccagttgggcctgtggatctgtgcagtcacgtacggggttctaaaatctgcaaaatgacaagctcacgaacactctcgcttctgtgggtgaatgtggataccccttggctgcgtctccctccacagggaagatggagacgtgtaaagtgacaaggacctgctacccctgggcaggttatgccggttccactgtgaggatggtggcagggggcttcccaggaggcctgcacattgggaagagaggggcgaccgtgtgtgactgcaggacccagggcgcagtcttaggactctgatgggggaggagatgctggggagccctgttctgccagcctggtgacagacatctcctaatgtttcccggctgggtacaactcacaatgtcctccgtggggaggcaattgcccatgaggcatccctggcagggatgatcttgtttcattgccacatatcccagcaatgaaacaagaatctagagtgatgtgattcctccgatgacttctccaaccatctggggtttttgtgcgactccaagaagggggaaggaggcagctctcgctcctctgggctcctgatgtggcagctctggaatggccacgtgtccgttggcccacagtgggccatttgtcgaatgtggttgtggtgggattggggctgggctggagagtgggtgaccacaccagctagcctcaccctgggccactgtgcagccaggggtttcatcttcccaggggtctcgttgtgagtgtcctggggctgctggaacaaattactggaaaccaagtggcccaacaaagattgattcgctcatggttctggaggccacaagtttgacatcaaggtattggcaggaccacactccctccgacagctcgaggggaggacccttccttgcctcctccagcttgcgttggcccaggcgctccttggctctggcagcatctgcagtctctgctctcatcacgtagccctccccaccgtgtctctttgtgtcccaagtccccttctgcctttctcctataaggacaccgagcactggatttagagcccatcccaaatccaggatagtctcatcccgggatccctaatcacatctgcaaagaccctttttccaaataaggtcacattcgtgggttcttggggttaggtattagacatgtctttttgggggtcactagtcaaccctctacagaacctcagacgaaagtgaatcttcacaggctgaaatgggggtgaaggtctagtgcgtccctcctccttgggagctccctcagggcttgtgcctatcctgtgatcctgtgatccagccttttttttgagatgaagtcttgctttgtcgcccaggctggagtactgtggcacgatctgggctcactgcaacctctgcctcccgaatttaagtgattcttctgcctcagccttccaagtagctgggattacaggcgcccacccccatgcctagctaattttttgtgtttttagtagagacagggttttaccatgttggccaggctggtttcgaactcctgacctcaggtgatccgcctgccttgggcctgccttggcctcccaaagtgctgggattacaggcatgagccaccacgcctggcatttagtaggttttggttgttttttttttttgagacagagtctcactctgtcatccaggctggagtgtagtggtgtgatcatggctcactgcagccttgatctcctggcctcaagtgatcctctcacctcagcctctcgagtagctgggattacaggcatatgccaccacccctggccaatttttgtattgtttagtggagtcggggctttgccatgttgcccaggtttgtcttgaactcctgggctcaagcgatctgtccaccttggcttcccaaagtgttggggttacaggcgtgagccaccacgcctggcttagtaggttttctagaagcgcctgaggcctggtgaaggcatggtgtcatggagtagagaacattcaactctgttcccggggagccggaacacacccctcgtagccaatctcaacagtcatgacgtggccaggatgacatggggagggggtggtgtggactgtgtgggaggccagctccccgggaagggggctggagtgggcttggctttgaggaggattcccaagaggaggaggaggcggtggcatgctcgtttggggggatggcgtgagccagggtgggcacctcttcatttaggtgtcaccttcttgacattccagccgggacatggtttccttggggaagatggacacccccagagtggggcatctcctggggaagatggacacctccggaatggggcgcctcctgttctcactgttcttctagcacacagttgtattctcttgcagttctggaggctgtgagatctcctggctgttatctagaacaaactcgcctttgagcagcgccgtcctgatggtggggtggcccctgcgggtggaacagcccctgctgtctcagagcttactgagagctagtgggcatgggagtggtgctggaccgaaacacccagagggatcatagagccaggcagtaagcacagaggccagctagtggggagggagggacccatccatgaaaagacaccaagcattgaaagagaggagaggatggttggggaccggcacacatgtgcattttgcgcagatggccaaggtggtgaggcgccagccacgcagacaactggaggaaggaggagtgccctaggggaggggccagctccggttctagaatgatccgcttgtgcacgtgggcctggctggaataaatcattgcatccgcaccgtagactcaatcgtaagctcacaccagggcagcctctgctttggtgcagtgtcttcgatcatgagttggccatggtgggggtgactccaaggggactcccaaggagggggttcaccggatctcccagggaaggtcatttgttttcttgggttggacctgggacaaggccttctcctgtctagtttctgttctccaacttgaccgcacggaaggatgctgaggacacctggaagccggcccctgctctacagcacccataggacagaggcacaccatgtggggacagtttggacagtgctcaggaggcagggagcagatcagaggaccgcgggaggccctgggaaccgcacgaggacccaggcattgagctctgcactttctggcatcagcccgatgtacagtctggctctgtgtctaccccgtacttcactttccccatctgtacgggggcggtaataatattctttacagcccaggtttaagcgggtgtagatgtgatgagcttggtaagcccatctcattacattcagttctgggcattgaaccctggactttctggctggtagaagtggacattcaacctttccttggggccctggggcttctgcagaatcagaacacagccagcagtttgcatgcagggtgcagagggacagagggacaccatgtcgggagcccacacctggcacacccctgactctggggctcagtgtcctgctgccctgcggccacgtgatcagctagaggtcatggctggacccataggcgaatacagcctgtggatttgattttgtttggccctgcggtgttttattttatttttagttttagtttgtggagacagagtctcgctctgtcagtcaggctgagtgcagtgacacgatctcagctctgcaacctctgcctcccgggttcaagcgattctcctgcctcagcctcctgagtagctgggactataggcgagtgtcaccatgcccagctaattttttatttttagtaaagatggggtttcaccacatcagccaggctgctcagtgttttaaaaagggcttgttttgctttgtgccagcatttaaagatcaggagatatcatataaagatccagatttctactctcttgagaagtgaacagctctggccacgccgggcccatatcctctagggcagtgacggagctgagacagggcctgtgacaactgagagttctctggagtccacacggctccttgcccagcttctggtggaggttgagcttagtgacccaggatttcgtctgtgtccaccaagaaggagaggtgcctgtggcttagagagggcgcccacaggagtgccttgcccaggaagctggcagctgaggcggccagggttagggggttgggcttcctcttcccctccccagtgcctgagtgcatttggaggaagagagacgggtgaggggaaggcactgaaattggtcctggagcgctattattgggggctggggaccagctgtcatcccttttcctgtgggcaggggaggcagtggtgggatcccatgagacccggactctgtggcctggtgaggcagggagcggctggggagacactgtgggtctccacaggggtgcgctgtgggtctggcctggggaaggagctggtgaatgtgcctgccatgtgggtccctccctgctctggccctgataaccaggagcggctggctctcatttggagtgcggttgtggggactgtggaggtggcagcttcccaggtaccatccccactgcctccgagggagcagaccctggtggagaggcaggatggctgcagggcgggagctggtggttggcatcactgcacgggcttgtagtagtggatgggaagatgcaggagaggctgatgactgagaaagttggttcctgtggactaagctgggggagccggacaaccaagtggttagaaccttgggctctggtatcagcctgatgtacagtctggctctgtgtctaccccgtgccccactttccccatctgtactgggggtactggtattctttacatcccagggttaagcggctgcagatgtgatgagctcggtaagcccggcgcctcgccggcactgaaagctccagtgtccgcccttagtgtcattgatggggttttgttcccgctgcggttctgattggttacagttgcggtcacttattattggaggcatgtcccccgctgtggctgatggtagaggtgtgtttgctggtggtgtcccagtgtgtgccttggctggaggtgaggagggataaaaacagccgcgacaagaaggaaatcaaggccgggcacggtggcgcacgcctgtaatcccagcactttgggaggccgaggcgggtggatcgcttgaggtcaggagtccgagaccagactgaccaacatggtgaaaccccatctctactaaaaatacaaaaattagccaggcatggtggcccgtgcctataatcccagctactggggaggctgaggtaggagaatcgcttgaacccgggaggtgccgctgcactccagccagggcaacagagcaagactccatctcaaaaaaaaaaagaaggaaataaaagtcttctctggaactagaacgttcctatgtagacgtagctggagggggaggctgtgtggtttgcgccgtggccatggcaagacacgacgggcagcatcttcccactccagcctgcatctctgccccagaactcatgatggttctcctaggatggggctgtcccttccgcttgctgagacatgaaggacgggaagagacccccggccctcaccgccgcatcgcctgccttcctctgctgctccttagcaggaaacatgccggagtgttccctagccatccattcaccaattgcatcccctctctttatttttcagccttgaaaagatcttttgaggtcgaggaggtcgagacacccaactccaccccaccccggagggtccagactcccctactccgagccactgtggccagctccacccagaaattccaggacctgggcgtgaagaactcagaaccctcggcccgccatgtggactccctaagccaacgctcccccaaggcgtccctgcggagggtggagctctcgggccccaaggcggccgagccggtgtcccggcgcactgagctgtccattgacatctcgtccaagcaggtggagaacgccggggccatcggcccgtcccggttcgggctcaagagggccgaggtgttgggccacaagacgccagaaccggcccctcggaggacggagatcaccatcgtcaaaccccaggagtcagcccaccggaggatggagccccctgcctccaaggtccccgaggtgcccactgcccctgccaccgacgcagcccccaagagggtggagatccagatgcccaagcctgctgaggcgcccaccgcccccagcccagcccagaccttggagaattcagagcctgcccctgtgtctcagctgcagagcaggctggagcccaagccccagccccctgtggctgaggctacaccccggagccaggagggtgagtcgcagagcgctaggtcttggatgctgtggtaatggggggcctggttgctggctttgccacagaatcttggaggaagaagctggatatggggtggagggtgctaccctggagacccagaaagaccggaatgcatgggggtgggggtctgcaagctcaggagaggtggctctctctgtctgatgggaacatgccaagatgccccaagcgggacttgaatgagagtttggaaagattttctgggtttcaaggagcctcctttatgggtcaccgtgggccttgctgggacctctgtctgctgtgtgtccctggagggcctgggaggcttagagaatgaggagccacgcaggaaccagggcaggctcatgcaggggtgtaggacagggtggagttgagacccctagaagggctgtcacattctggtggctcctgcttgaggaattgcaggctgcctggatatgcccagcagaggccgagggcttggggaagggaggagggacgtatgcctcctgaggcttgcattggagcccatggtctggtcctcctcccccaggagggatggttgtggcagagggaggggaacatgaggagcaccttagcctgcaggacaaaattctcagggcactgggaaggggtgcctggaccagggggctgtgtgatagctgcacacggttttatttgggggtgcccttctggcgagaggagagaggccatggggctccagcagcgtcctgggagggctcaagcccacagccgtgctgacatggagcttacaggcaggggattggtgccagtcctgtgggacacagggcctgtttggaaatgccaggctgtgggacatggttgggtcccttctcagaagcgtgccccctggccccagcagggatcgtggctccatggggctatagtaaggtgccagctgggttagaagcccctcaagagccaggtctgattctgggcacaggatcagaactcagtaatgctcagtaagccttctttaggttggacaaacagcacagtctgggtttttgatttagctgctgcttcttatttctaaccgtggtgaaatacacaacatacaatgtgcaattttagccactttgcagtgtacgtttcagcggcattcagtacattcacggtgttgcgcagctgccaccgctgtccatctccggtacccttttcatcctcccaaactgagctccgtccccgttagaccaagctccccatgcccctcccccagctgctggcagccaccattctattttctgtctttattatgaatttatttgaccactctaggaaccttgtgtgtgtggaaaaatacaataactgcccattttgtgtctggctcatttcactcagcatgacgtcctaaaggttcatccgtcgtgctgtagcatggggcagaatttccttcctttcagaggctgaataatattctgttgtgcgatgcacttgtgttgtgtagctgttcctccatcggtggacccttgggttgcttccacatctctctaagtcccgctttccatcttctttgacttttctttgacttttttgagacagggtcttgctctgtcctccaggctggcgtgcagtggtgtgatcactgcttactgcaacctctgccccctgggctcaagtgattccccaacctcagcctcccaagtacctaggaccacaggttgcgcgccaccatgcctggctaatttttaaattttttttgtagagacaggttctcactaggttgcccaggctggtctcaaactcctgggttcaaatgagcctcctgcctcggcctcccaaagtgttgggattataggcatgagccacccaacccctttttggtttttctttttgaatgagagttctccagtggtcagtgggcttgggggctgggaggatgtggggcctggagagggtgtgggtttggggggagaccagtgctcctcatgctttcatgggcatgtggagtgcacatttgtcttggcgggtctggggcctgggactctgcatttcctacagagggggcatcggaacacactgagtagccagaggctagtgggccttggaaggtcctttccggccctcagtgtgcgagtcccgtgttccctctcccatctctctaagcttgactctgaagagccaccctgccccagccacccagactcagtgacagtggttgctggtggcatggtgtcaggccaaaggcatgggcagtttgcagagtggcaggaggctgtttcctcccctgccttctgttggtgcaggacctttgtttgacgtgccggatacacccccatcctgggttgatgtgttcacactcagctgagtcaaacaggatgtggctggggaggcggttgtcaccgagccatctaaatctcggtgatggctggtgctggatgcacagggacgtggtcctggctctgggggacaggtagggggatgtccatggggatgtacaagaacattctcctccaggggcagacacagtttagcccctaaattgtgccagagactgtgccgggagccaggcccaggg

SEQ ID NO: 263 - DNA, 2801 bp, Homo sapiens
tgacttctcagggttcctcctgggcaggtgctccggaaccttttctcagcacgctggcctggggcacggccgttcctcctgcccagccacgttggggtacagggtgaagaagggctggggccagcccaggacagaggaaggcgaggcaggcacgcaggaactgggctttttaaacccttaagcccaaggaaatcgtagcatcgcgggacagggaaaatgaaagactttggaagtcgtcaggaatttgactctgtgagttggtttccaagagtctaagttaagcatctccaagtggatattaaaaaggagcagcaagcctcggggcggcgggggctggaggaggtggagagaggaggctgccggaagccgcactcgggacctctgcagccaccgaccagaccgggcggccgggactctgggactctcgcaggcagacccggtggtctgccggactcctcggggcccacttcgggccctctctcctgcctcctatttttggatttctctcctttgctccctttttcctcccgttttgaagagacaatgctacttcagtttggagcacaaacatatgatcagcacatggaaatgtggtaattcggatgcattcgtgattgcaacagattgaagaaattagaccagacaaagagtgtttttagaggaggaggaggaggaggaggaggctgagagagggagggcgacgggggtgagaaaggggaggccgcctctgagcgggacgccgggactcccgccgctgctaaatatatccgtaggaatggagagggaccggatctcagccttgaaaagatcttttgaggtcgaggaggtcgagacacccaactccaccccaccccggagggtccagactcccctactccgagccactgtggccagctccacccagaaattccaggacctgggcgtgaagaactcagaaccctcggcccgccatgtggactccctaagccaacgctcccccaaggcgtccctgcggagggtggagctctcgggccccaaggcggccgagccggtgtcccggcgcactgagctgtccattgacatctcgtccaagcaggtggagaacgccggggccatcggcccgtcccggttcgggctcaagagggccgaggtgttgggccacaagacgccagaaccggcccctcggaggacggagatcaccatcgtcaaaccccaggagtcagcccaccggaggatggagccccctgcctccaaggtccccgaggtgcccactgcccctgccaccgacgcagcccccaagagggtggagatccagatgcccaagcctgctgaggcgcccaccgcccccagcccagcccagaccttggagaattcagagcctgcccctgtgtctcagctgcagagcaggctggagcccaagccccagccccctgtggctgaggctacaccccggagccaggaggccactgaggcggctcccagctgcgttggcgacatggccgacacccccagagatgccgggctcaagcaggcgcctgcatcacggaacgagaaggccccggtggacttcggctacgtggggattgactccatcctggagcagatgcgccggaaggccatgaagcagggcttcgagttcaacatcatggtggtcgggcagagcggcttgggtaaatccaccttaatcaacaccctcttcaaatccaaaatcagccggaagtcggtgcagcccacctcagaggagcgcatccccaagaccatcgagatcaagtccatcacgcacgatattgaggagaaaggcgtccggatgaagctgacagtgattgacacaccagggttcggggaccacatcaacaacgagaactgctggcagcccatcatgaagttcatcaatgaccagtacgagaaatacctgcaggaggaggtcaacatcaaccgcaagaagcgcatcccggacacccgcgtccactgctgcctctacttcatccccgccaccggccactccctcaggcccctggacatcgagtttatgaaacgcctgagcaaggtggtcaacatcgtccctgtcatcgccaaggcggacacactcaccctggaggagagggtccacttcaaacagcggatcaccgcagacctgctgtccaacggcatcgacgtgtacccccagaaggaatttgatgaggactcggaggaccggctggtgaacgagaagttccgggagatgatcccatttgctgtggtgggcagtgaccacgagtaccaggtcaacggcaagaggatccttgggaggaagaccaagtggggtaccatcgaagttgaaaacaccacacactgtgagtttgcctacctgcgggaccttctcatcaggacgcacatgcagaacatcaaggacatcaccagcagcatccacttcgaggcgtaccgtgtgaagcgcctcaacgagggcagcagcgccatggccaacggcgtggaggagaaggagccagaagccccggagatgtagacgccgccctgcccacccccgggatcctgcccccaagtcatttccgtcccccccccaggccctcccaccaccccattttattttatatgattttctccatttgtcatcgttccccagccttgagatgcttcactttccttctctgtaaccagactttgaaaaattgttcgtttcatcaggctctgttcctcaatggccttttgctacgtgcctcccgagaaatttgtctttttgtataaatgacaaagtgttgaaaatgtatttcctgaaataaatgtttcaaatgcagaaacccaaaaaaaaaaaaaaaaaaaaaaaa

SEQ ID NO: 264 - DNA, 1707 bp, Homo sapiens
atggagagggaccggatctcagccttgaaaagatcttttgaggtcgaggaggtcgagacacccaactccaccccaccccggagggtccagactcccctactccgagccactgtggccagctccacccagaaattccaggacctgggcgtgaagaactcagaaccctcggcccgccatgtggactccctaagccaacgctcccccaaggcgtccctgcggagggtggagctctcgggccccaaggcggccgagccggtgtcccggcgcactgagctgtccattgacatctcgtccaagcaggtggagaacgccggggccatcggcccgtcccggttcgggctcaagagggccgaggtgttgggccacaagacgccagaaccggcccctcggaggacggagatcaccatcgtcaaaccccaggagtcagcccaccggaggatggagccccctgcctccaaggtccccgaggtgcccactgcccctgccaccgacgcagcccccaagagggtggagatccagatgcccaagcctgctgaggcgcccaccgcccccagcccagcccagaccttggagaattcagagcctgcccctgtgtctcagctgcagagcaggctggagcccaagccccagccccctgtggctgaggctacaccccggagccaggaggccactgaggcggctcccagctgcgttggcgacatggccgacacccccagagatgccgggctcaagcaggcgcctgcatcacggaacgagaaggccccggtggacttcggctacgtggggattgactccatcctggagcagatgcgccggaaggccatgaagcagggcttcgagttcaacatcatggtggtcgggcagagcggcttgggtaaatccaccttaatcaacaccctcttcaaatccaaaatcagccggaagtcggtgcagcccacctcagaggagcgcatccccaagaccatcgagatcaagtccatcacgcacgatattgaggagaaaggcgtccggatgaagctgacagtgattgacacaccagggttcggggaccacatcaacaacgagaactgctggcagcccatcatgaagttcatcaatgaccagtacgagaaatacctgcaggaggaggtcaacatcaaccgcaagaagcgcatcccggacacccgcgtccactgctgcctctacttcatccccgccaccggccactccctcaggcccctggacatcgagtttatgaaacgcctgagcaaggtggtcaacatcgtccctgtcatcgccaaggcggacacactcaccctggaggagagggtccacttcaaacagcggatcaccgcagacctgctgtccaacggcatcgacgtgtacccccagaaggaatttgatgaggactcggaggaccggctggtgaacgagaagttccgggagatgatcccatttgctgtggtgggcagtgaccacgagtaccaggtcaacggcaagaggatccttgggaggaagaccaagtggggtaccatcgaagttgaaaacaccacacactgtgagtttgcctacctgcgggaccttctcatcaggacgcacatgcagaacatcaaggacatcaccagcagcatccacttcgaggcgtaccgtgtgaagcgcctcaacgagggcagcagcgccatggccaacggcgtggaggagaaggagccagaagccccggagatgtag

SEQ ID NO: 265 - DNA, 21749 bp, Mus musculus
  misc_feature (1)..(10): "n" at positions  1 through 10 can be any base.
  misc_feature (9223)..(9475): "n" at positions 9223 through 9475 can be any base.
nnnnnnnnnnccatgtatcccttaaggccatgcccatgagactcagttcctctaatgacgtttcacctcctgaagactctataccctctcagaacagtgtccccaggaggaggttgggggacaccagctggatcagcacccatccctctctgtctcctgtctgagtaccctgtgagcaacagcctcaacttccagacgctgtgcctttccctccacagtggacggtgtccccgagctgtgaggcagaacaaaccctttctccttgagtcgggtgttctgtcccagcatcaggaagagcaagtggtacaactagaacatcagcatgaccacggtcctgtttccagcaccaaaaatacaaatatggctgccatgctccccgtgggtgggtgggtggggcgagaagccatatctcaggtctctgggtccttgggtgaggttgaacccccccataggaggataaagtccccgagtaacttccctctttcgccatgaaacccagatccactcatggggccttcttagtacttattgcttgaggccccatgcctatgacagtggcctctacctaaggttgatgagcaggccggtgcccattagcctagccccaggtgcttacttgactggctgactggggatgacagctagccaactgatacctagtgctgctggctgtcacacctgaggttcttctccccggacaagtaggcatcttggcccccatctccagtgttaggtgacagctgactgcccagacttgctaggcaagtcctggctcacttgtctcagtcccagcaaactcagctgcctctctgggctggagaggaatctggcatgactccctcactctgaagacagcagctgcagacttcacagagcttcccttccccatcctctgccctttggctctggtgcccattgggcttctgtgctgggccctgaacaactacaatggagaggcagcttcaaaggtctgcccaatgtgttggccatctgtatggcagggctacctttaactccagaatttcagctttccgatctgatctgggggacagggtaacaaaagcattgggggcagagaggtagaggcatctgggagatgggtccatgggtaaaacagcttgctatgcaagcacgaggacctgggtttaaatccccaggacttaagctgagcatggtagagtatctaccatccagctgtcccacagtgagataggaggcagaagtagaattcccagaagctcgaggggcagtgagcttagcattcacagaggcaaaacaagagaccaccccattctaccccaagccgtctcatattaagtggaagacaaagacctctgatctccatatacgcaaggctgacttcctggctatctgaatagcccaacctacaacagttgatgttttgacctcaggtccagagctcacccagccttattctcagctgagctcttcctctgtcacccctactccgacccaggcatgatttagcagccatagatttggaaagactggagccagatagaagtatacatcactccagagcctggagagctctgcctttcactcagaaagtcatcacaggcccaccaaacctgccaatgaggcctaagagtctctctcctgtgctgtttggatttttgtcaattagatacaagctagggtcatctaggaagagtgacacttccttgaaaagatgcccccatcacattggaccatcgtctagggagcgttttcttcatgattgatgtgggagggcccagccctttgtaggcagtgctatccctagccagatctgggcgaggtggcacatacctttggtctcagcactcggggaggtagaggcaggcagatctccatgagttcgaggccagcctgatctgcaaaggcttcctggacagccagggctacatagagaaaccctgtctgggtgggagatgcagggagcaaattgagcagggcgtggggttcaagctagcaagcattatttcttcacggtctctgtttcaatccctgccttcaggttcctgccttcccttcatgacaggctgtaagatgaaagaaacctgttttcttccccaggttgcttttgatcgccgtgtttatcccagccacggatgacaaagtaagccagaatccccaaacggcctctgctctgcggcctgttgggattcactctttccttgattcgtttccagtctgatttctttgaccacccagacactgctgggctctagaccagcccttctcaacctgtgggtcgtgacacctccagggggtcctgtatcagctatcctgcccatcagatgtttccattatcattcaaaacagtagccaagtcacaactgttttaaagggccacagcattcggaaggtcgagaaccgctgctctagacggagccctgaccagcaggctgactttttttcccaagtccgtgtggttctctctcacatgatgctctctttggctctgatgctgttcctaactgtcctgcctaggatgcagctacctccatccatctcctttagccccttggatctttccactttccccactctcccagcatggaagatccactcggctgttctccatgctgacatgcctaggcccaccctctacctccttctggaggccgtagtgtaagactacagagctttctttcctcaagcatcttcccgggatccttcctgcccgcctgcacccccccccccaatccctgagaagaacagagaatgacccatcagcaagccaatgggttaccccgagaatgtgacaaagggtgaggctgtgggtcccaagggtctgcagatagagggacgagccagcagccttgggtgcaagaccaggccttggagggtatctctaccttaccttataccacagagagaagtctggctcccatgttgccctgtggatgaaggtgggcaggctgagcacaagctttcaggaaccattgaattcattgtgaggctgagatggatctgcgtccataaggccaggaggggtaacagtgtcagaccccagccccagagggcgctctgcggttgattcagtagccaggagcatccagagagctcttctggggcccttgctttgtctcccactctgcaatccaggggagatctgcagccccttttccttggcaacactcaagacagaaagaggaagctacatgcccagccacccacggggaaggagattggttccactcctgcatgaggttgtcgacgaagtcattctgccttctagcaggacaatggagaattgaagaaagagggccgaagaaatggctcagccgttaagaacacttgctgctcttgcagaggacacaggttcagtatcccaggacccagatggtggcccacaaccgcctataactccagttccaggagatctgaccaccttcttctggcctcctcggccaccaagtaggcatgtgtacaggtacagttacaggcaaacactcacacactcaactagccagggagtctgctggctagtaaatcccaagtggccaagtggcctgcttctaaatccttccttgtagctgtctgatattcactccatcccaagtcttaaaaaataaataaataaaattgacgttattaccttcattttaatgcaaagggaacagaaatcagatcagagaggttaagtaaccagcctgagatgccacagctgaggtcataaataaacatctctccccttcaatctctgactttgaacagcccttttaagagactgtagaacacagatgcttctccgttcaggaggaacgatgacagctccacagggtctgttcctggaaaccccagctggctgctgacatttcctgggtgcatgctgttccgaggcagatgtcacccaggacccctgaaccagatggggcttctcagatcacagctataacgtgactctcgggactcagtttcccatctgtgaaatgaagaggctccttcctcatcttgcttcagcagttcctgtacaatcaagtatcttagtttgtcccagaagctcagtaagtagccggatgtaccaaaggctcactgtccaagtgactcacgttggcttttaaatgatcgatttctgggattcttctgtcttactattagtttgctgtgacagactaaccaacaagaagcaactatgtaagggcttatttcggctcacggttgaagggcacagcccttcatggtggggagccacagtaaccggtttgtgaggtagctgctcacattgcatcttgcttcggggcagggagcagagagagagatggatgctggtgtttggctcactttctccttttttcttcagtcctatggatggtgctgctcacagctagggtgagtcttccaacttcaattaacctaatgtgaaaactcccgcacaacagcagcggcctgaggagcgtctcctacatggtcctggggcctagagagttaacaataaccatcagccaggatgatgcccaggttatatttactgtgcttcacaaactgtcatcttggaaacagccttgtgcctggccttactagattggatcttatttttcaggtaagaaaaccaaagcccagaatccggaatagctcagccctagtcaggtgactctagaccagcggttctcaaccttgctaatgctgcaaccctgtaaatacatgctgtggtgaccttcgccccataaaattattttgttgctacttcataactgtaattttgttactgttatgaattgtaacatcaatatcttctatgtgggatagctgatactcaacctctaggaaaggacccttgggccttaagggggggggggtctcaatccacaagttgagaaccaatgctctagaaagtggtagagggattttcagacccagtgatggtaggtagagcttaaggttgccccagctttgtgtccaagttccccccccccctcccccgtttactgtgtcagggaggatgacggaccagtttccagactaggaaaacccaggtactgaagaaatgaataaagctgaaagaagcagcggtagctggggtggtggacaaagaaaggcactggcctagcagctgaggggcagaggcctcagtcgcatgagcccatggaataactgtagaagtggctgttaatttcagcaaactgtcttccggtgtcctctgggacactaatgcaaaacagaatcacgtttgcctgcttcattttgtgaggtaattctgtaaattttatttacttgtttgtttatttatttatttattcgtttattttatttttttaaattaaactctatatactagggtttaaatgctgctcacatggggggttcctgaaagccctggagggggcacacgtgggtctgcccgtgttttaaacagaggtatctcctgcaatccgaagtcacttagcctggtgcactttacacctttttaaagattattccccactgccctccccatccccaccccgacacatttgtgtggaggtagcagagacggaaaaagctgtgctgtgtctttaaacagggaggagcgatcagcagaagcctgggctgtaaaaaggctaatgcgctgtggaagagtaggagtttaatctaatttagttggagggtgtctgtctgcggtgttgttttttggagtgtgggaacagaggaggggagctgcccccttgaatggtcccttctgcgccagaagcagtggggagccgcgcgacgccagcgatccaaggcccggccttgaaagaggattaaagcgatgcttgatttgcaattcacacgaaagcgccccgcgaacctctggtaatatttcaatccacatttcaagggaagtggccttaaaatagcggcctaaattgttctgccgcggcccggacactccttcatgcattttataacgcagagggccaagggccttttctctctgcgcctcaccacccccaaccaccccgtatcttacatgtgctgaagtgtaattaaaacttgttcttaagtttggggcaacctacactgctttgtggtatgaggtgtgtgtgttttatgcttggagcatatgtttgtgtgtgttaactaaacatcactttggatgactttaatatatctcctccgaaaggggggggggggattgtgaggcagtcgtggaaccaagcctagtgggttggaaaactgaattctcaatgtgtgccttttaaagagaccattaccagtaagcagaccactttccttactgtaaggaacagtttggaaaatgcaaacagagatcttaagagctttccaactggatccgcaaataggaaagttctagaaatggccttgaagctaccaagacaaacgttaaggagccagctccctggttcatcttcaggctgggagacaggatgttcatgtctttctataatctctgcccataccccacatgtttactcttgcaattagcttgtaacaggctaagcttctggcttaatttttctttattgtaggagacgaagtactttttttttttaatcttaaagagattatttgggttctctctaatcctatttcagaaacccctctcaagactttatggttccttcacccatactgaggaaggctgcagctttgattaccactgagacccatggcagagaatcttttcttttttttttttaacttctgactttaccaattaaacagggccttcctttcaactccccaccacctccaaaattatttaactcaagacaccatctgactcttaaagagtattccttccagaataccttgcactctccttggtagacatttgcaagaactctacgctaatatctacagacagtattttgaaatctcacgtagatagatatattaggagatttggggtccaaagtaccctttgctctaggatgctatttaaaatcatgtttaattatcaagtttcattaaaaacccttgctcaaattttgagaaacctaataagatttccattaatttaaacatagctctattcccaggccagtcccccccaccccaccccaaagctttctcttccctcttttatccctggttaaatatgtaaataaaatgtctaaagtcgttcttcaaagaagacaaaagaaaaaaaagagccgaggggagagagacagccataaaattcctcccagctctccataacgcttgccagaggggggccggtttccgagccagggctgagcagcaggggacccggctgctctggagtcactcgtctcaaatcccacacacaggagagagaaaaataaaatatcttttcagctggagccatcaaaggggtcctttcatttattagcgttgccttccactctcgctatctcggggcccttatttttagatactaatgtctatttgttgctttcctttctttttctatactaggttgggcagatggaagaaattctgttagctttttcttctcttaatgtattttaagggagtcccggggggttgggggagagaagaaaggaacgtgaagtgatcatagctaaaataaaaggtcggaacactgtagaagtaaccagagcataaaagaccaattacgtggggcagtctcaaatagctcacaccctgctccggagctgagctcacccaggctacttccacgccccccacgccccaaggggcggggggggggagtgtggaattaggagagagagagagagagagaaaacagaaggcaaaagtgtcaggaaggaccccttgcaaactagtctgtcttaaagctaagcgatagcccaagaatcttacctgacttaaaaggttttggaaacagcgtactagactataaatatctaagtaaaccatccttatccaagccgcaagcgttcaccacaccgcaggtttttcttgggtcactaacacggtggtgggtggtgattctgactgtgttaacctcagtcttccggaccgctgtttccacggatccaacttcctcccgtgaaaggcagaggggaccaggggatctaaaggtgaggcatgagcctgtgcacacccctccgccccccacccccaggactcagcaggtcctgggagtgtcccagcctcaggtctgtccgctatgtctgacaaacgaaaggggggtaaagaggaagaactccctgcagatgggacgctgaagccttgttttaattagaagtcgatcctctgcaggaagcgcaaggcagggcggggaggaggggtcctgggtagcctcgttcctggcttggctggagccactgaaggcttccaggcatctgtgcacccaactcggccctggggtgcgcaagactgactggccgaaagatgagcaggggacttagctgcacctatgcagttgggggagtccgcactggaggtcctggtagtttcccagacacttaaaacgcaaacctgaatgggggtggggtggggtctaaggagagagtgggccaccgccctgagggctgtttatccaaagccaagagtccgcgacaggtgccgcaccccagatctgtcggacatctaaggactgcggtgggctcccatggtgcactcactccctgtgcgggggaaggaggttgaagctctgtgtccttatcacagattagcccaaaaccaaccaaggggcaggagccagcatagcaaggcacggagaggccccaccactctgcgtgggaaccagccgtgcgcgtgtaggccggggctcagcctccgcctcccaggaggacgcaggccgagcacatctttcgccaaataatataaatacacaacttcctataataaataaactcagccgcttggagaaaccaccagccggcttggcgcgatggtccccaacacggtggccttggcggggcaagggtcaccacgatccaagccaagcccctcttctcggggtgcggggtgtcagcggcccggaaagtctcctccccgccccctcccttctttctttgagtagaccttgcagaagaggccctaaactccggcttcccaagtcccctccccctcccctgcactcggcccttttgaaatttcaaaggcagcccctccccggagtccgagctccgcgccccgggcagcaaacccccggcttcgggaagatgcgggcagctttacaagccgaggggccacttttttatgagcacggtcataaaacgcaaatcccgtgtctctttgaaagtgccctccgccagggcccggtcgtaaaagtagaagatgcgtccccagcccccaaccccgggtgaggaccacccttacccgagtccccaannnnnnnnnnnnnnnnnnnnnnnnnnnnnnnnnnnnnnnnnnnnnnnnnnnnnnnnnnnnnnnnnnnnnnnnnnnnnnnnnnnnnnnnnnnnnnnnnnnnnnnnnnnnnnnnnnnnnnnnnnnnnnnnnnnnnnnnnnnnnnnnnnnnnnnnnnnnnnnnnnnnnnnnnnnnnnnnnnnnnnnnnnnnnnnnnnnnnnnnnnnnnnnnnnnnnnnnnnnnnnnnnnnnnnnnnnnnnnnnnnnnnnnnnnnnnggcggaggctgcccggggcgcaaggctttctgatgcaaagcagcagcggggcggggcggcgggcggaggcggggcctgtcaccaatcggctttgctttttttttttttttttccctctttgctaccctttgcctctttgcaagtcttctcatcccgggacgccgtgctggaagcagctgcgggcgccgggagggaggagctccagggcctagggccacggtgtgcccgcgctgccccaccgcggtccgcgatcgcccgcgcccggaagaagaggccaaagtttgcgcgctgagcggcgctcgctccgccgtattgtttgcaaacttcgctcccctcccccgccgccccccgactccgctgaggccgcgcgcccaccgcggtggccccgggcgccgcgagcgctccggccagactggatgggcatgcgcgggggcccgagccggggcgcggagccgcgggcagcagcaacagcccgtgcccgggagcggcggccctgagcggcgctgggacattgagggcgccaccatgcaacacccgggcccgcgcctgtggctggtgctgcaggtgatgataggctcgtgcacggccatcagctccatggacttagagcgccctggagacggcaagtgccagccggtggagattcccatgtgcaaggacatcggctacaacaccacccgcatgcccaacctgatgggtcacgagaaccagcgcgaggcggccatccaactgcacgagttcgcgccgctcgtggagtacggctgccacagccaccttcgcttcttcctgtgttcgctgtacgcgcccatgtgcaccgagcaggtctccacacccatccctgcttgccgggtcatgtgcgagcaggcccggctcaagtgctcgccgatcatggagcagttcaaattcaggtggccggactccctggattgcagcaagctccccaacaagaacgaccccaactacctgtgcatggaggcacccaacaacggctcggatgagcccagccggggctctggcatgtttcctccgctcttcaggccccagaggccccacagcgcgcaggagcacccactaaaggacgggggtccggggcgcgcaggttgtgacaacccaggcaagttccaccatgtggagaagagcgaatcttgcgcaccgctttgcactccgggggtggatgtgtattggagccgcgacgacaagcgcttcgctgtggtctggctggccatctggtccgtgctgtgcttcttctccagcgccttcaccgtgctcaccttcctcatcgacccatcgcgcttcaggtaccccgaacgtcctatcatcttcctctccatgtgctactgcgtttattcggtgggctatatcatccgcctcttcgcgggcgcggagagcatcgcttgtgaccgggacagtgggcagctgtatgttatccaggaaggactggagagcacgggctgtaccttagtcttcttggtactttactacttcggcatggccagctctttatggtgggtggtcctcaccctcacttggttcctggctgctggaaagaagtggggccatgaggccattgaagccaacagcagctactttcacctggcagcttgggccatcccggctgtgaagactatcttgatcttggtgatgcgcagggtggcaggggatgagctcactggtgtgtgttatgtgggcagcatggatgtcaatgctctgaccggcttcgtgctggtcccgctggcttgctacctagtcatcggcacttccttcatcctgtccggctttgtggctttattccacatccggagggtgatgaaaacgggtggggagaacacggacaagctggagaagctcatggtacgcataggggtcttctccctcctctacactgtgccggccacctgtgtgattgcctgctatttttatgaacgcctcaacatggactactggaagatgctggccacccagcacaagtgtaagatgaacaatcagaccaagacacctgactgcctgatgaccacctccatccctgccgtggaggtcttcatggtcaaagtgtccatgctgctggtggtgggcatcaccagtggggtgtgggtctggacttccaagaccctgcagtcctggcaacacgtatgcagccgggggctaaagagaaaaagccggaggaaaccagccagtgtggtcaccagtgcagggatctacaaaaaagcccagcacccccaaaaacctcaccttgggaagtatgaactgcccgcccagccttcagcctgcgtgtgaaggcagagctggctgcaagaacaggacattcggagcccaaatgggcagcttttcttggttggctggttgttggtaaatcaaagtaaaaagaatatgtatatatatatacatgtatgtgtatgcatgtgcatatatatgcatatatttacacatacatgaagtctaccttgaggttcagaacagctgaatgtaaagggttctgttcagtttgttgcctccctgaagggtcgctcattaaggagggagcctcttgtgtaactaatttgtggtaaagtagttgattcaaccgccctccagaaaacttttgtttaggcctcaagcacacagctgtgtattcagaaggctttgctgcctgtgcataaacttgaggctggagagctcctttgtaagctaaagagctttcctggggggggggggcagccagtgagccacccaagggcctgctctccctccctcactcccccagctaggctgctgtatgggtgggagggaaggtgaggaggagaggggataaaagaggtgacaccccccccagcccaaggtctgcctgcagatcccttaaaagagagtcacttccccagccttcatagccatgtttctcccaacacagagcccacgctaccctctcaccccactgcagatctaacactggagaattcaaatggtgtgcaatacttttttttttttttttttacattttccccctctccctagcaaaacaaatgagagagagaaaaagtattttgttgtaaataaaaggcaagaaaagaaatcatctaacaaaagaatttagaggctcaagcctcagggttgggggttgggggggcgccttcagcctgatacattttgtggctttttaatggaaaccaagccagtgtgttctacacactgggactgatttgtggagaggaagggggagggggggaagccagtggagagcaccagagggcttattgactctctgaattgttaaacaaatgatttccatgagtggtcttgaagcacttgggaagacaaactttgtctccagccagggagggccatgcctgcctctgtatatctgtaatataggatatttttcatgctccactattttattaaaaataaaagacattctttagtttgctgctagtcactgtgcattggtgaggggagcgttctccatttcttagcagattcttgggtgtgcgaggctggctagacatggaccatgaacctggatacaagctggcaaaataaaacatcctggggctcagaggcctgtgtgctggctgtgggaaaaggtggcggtgactctgcccccaaggctccatggatacacagaatgccgagaccacactcacccaggatgcagcagtctttacctgacctactgtgtgcaccagtctgagtggaccactctactgcagctctggggccatgggatacatttcagagctggataggtgaaagtgggactaagtgtgtggtggggggagggtcatcagcaacaaattcagaagcttggccaccttgaagtttctggtaccctttcttctcatcactaagacaagctataggccctggagcagacccaggatccactaggcttgactaagctaaagttctagctagaaggacccaaggacacagttcagctctgagaaattgggggggaggggtcagtgtagacctacccaactctgaccttcatagctcagaagcactttaaactatttgagcccttctgaagcagagataccagcttgatcgtggctttctgaagcaagtattggggaagtttcacagggccatgggtccttgagcaggaaggacaggtgaattgggtagtctggggaacaagttctagaaatcaatgctgggcagccgggccatcggtgagcataaaacccagaacccagaatcatggaaataaacctctatattgactattgttgtccttaccaccagaagagacactaagagtgagtgtgtgtgtgtgtgtgtgtgagagagagagagagagagagagagagagagagagagagagagagagagaggatcactggagtggcaactggccagacctaggctcatctgcccccctgagctgtagtggttagttgtataggttttgaaagttcatacagagcaatgcctcagccaagaacatgataaggccttgttcagctgtgagcctgcttgacggtggccccatccccaacagtgacagggatcctgtttacaaatatcaagagactaacaagtggccagaagtgtgcttttaacatgtgctccttgggccatagtgagaacagcctgagcttctaaggtatttgtttcctgcaccttctcttgtttcatccgtctctctacctgcatcagtctgtctcttgcagttgaactctagttctaaaccagatggtagatttaaagaaaaacatcaaagcttaaaagttagaaagcttacacccagacacacagacacacaaacacaccacttatctttggacacccccccacccccccacccaatcccctccccctcagctctgtccagacctcgaaagggaactgctgtttccttaatttggagactgtaggcttcactccaggaccacagccatgctgatggagagacaggaggatttctgagttcgaggccagcctggtctacaaagtgacttccaggacagccagggctatacagagaaaccctgtctcaaaaaacaaaacaaaacgaaacaaaacaaacaaacaaaaaaccccaagaaaatcaaaacaaaacaaaaaaaaaaaaaccccaaccaaccaaacaaacaaaaaaaggcccggaaaaggtgaatgtcaaggtctcaaagcactcagttcttgatctcctaccaccagctgttgctcacatgttaagagagcccgacttagggaaaccatagcctcatagaggagacagcggctcacgtctcctgagttccaaatattggggagatatcctgagccaggggtcccccctgtggttgggagacccagcacaagtgcctgcaagaaaagtgaagctgctggggtcatgcgaagggcaaaggtaggaaagagaacacccctttgagaaagtgataggcagggtctagctggtgccccttatataccccacaccaagcacagtgtcttgtccagtcagtacacaacacagggaaagaatggggagaacagctgtggccacagcccaggcagatatgagagcctctctggaccagtggttcaggaagtgatcttttcagtagatggcgtcgggggtggggagatccaagaagcaccaggtgtctgtatgtccagccctctgacgaggaaattcaaggttcaaagggctccggagtccagcctaaggtctcagcttattttttgaactcagggtctctcactaaactagtcaccctggctagactggccagtaaactctggcaatcctgtttctgcctcctctctagcactgggatcatgaatacactgttacactccagtgttgacagggaactaggggttcaaattcaaggttcctttgataattcctagactaagccaggatatgagatgagcactaagcccagaacagtccagtgccacaatggagaaaccaggcctacttatacatccattgcccctcccctcggagagtcaaacatgcctcgctaatggtctccaaagagaatgagcttttgagctttccttacgggaacactttccgacgccaggcacaggattccagagaataccctctgatcttgcaagtgtaaaaggcggcgcagtggcttcgccccggtgagggagaccctagctctgtgtctttgaacaccctcacatcacagtcacctcccagggacaagggctctgtgctgactcctcccccaagcaaacggatggcccagcagcaacagctggaagatgagaaacgcagacaggctgcaggggagccccgggatgacacggggctgggggttttcatgttttattaagagtgcggaaggccaagctggggggaggagggactgaggcgtttgaaatccaaaaagaatgagttgctatcaggtaggtgagctgttgtaattggggacacccctaggaaaatgacacggttggagcgctggcaggtcctcggcagcctgtgggaaccttcggaaggcatcgtatcttgccttttattagaagacatttttaattaaaaaatggggattcccagcctctcctccaggggctttagtgtcaatgaaaggattcaaagccattctttgcctggcacctgcctccgtctagaaggtcgtggcttctgggggccttggagggagagttctcaacctgagcactagactatatcttaaaggctattcttacctgttttaaggacctgtaaaagcagggtgatgcatgccggaaattctagcgtttgtgaagttgaggtaggtcagttgccagctcaaagtcagcctgggctacatagggagagccttactcaaaacaaggaaaacaccctctcatggtatcccgagaacctctgcatttgccccatccctaccctcagagtcccaaacacacacactgttagctatgtgcaccatcctccactggcaacctgcctgcccagccacccttagatccccatactccacaccccccactgcccccgctatgattcttctgaggctattatcaatctgccaaggtcccgtctgtcaccagggtcccatgaagtctggcctggactaaactcagaggcaaaatttcggttacttgcttttctttgtttggcctggagcaatgagtctatcattagatttttctctcttggagaaatatgtctacatggataaaacggtttgttgaaagggtggagaagggtggactgtaaaacttgccgttctcccacagtggctgaaagctgagtgttttccatcagtgaagtccagagctcttccatgtttagccttagcccatctcccagctaagcagaggacactaaagaaggcattccccacagggaccaaggagatgtgttgtttattctgacttacccttcagagggctttttttccccccagtggaaaaaatgtcccaggagctggggaaatggctcggtggatgaagtgtttgctcagtaggtatgaggagaggacttgagttcagatcccaggtacagccccaagtgtggctgtgcctgtctgtaatcctggttctgggaggtggagacaggaagatcctggggttcgctgagcagccagtctagccaaaatggagatctctgggttcaatgagagactctatctcaaaaagaaagccagatgaagatggaattgaggaatatgctctgtcaacctctggcttccatgtgcactcataccagcatgagcatcacatacatacacaagtgtacacacacacacacacacacacacacacacacacacactaagaaatgaaaagatactgcctatatcttaggtgctaagccaacgcccaagtaagatacccatatagcttaatgaaatcacatctttccatctggggtatgaagtgtgtccttttggaacacaagagagaggctgtgcacctgggagaaaacaggagaaatcttagttttgtttcctgttgctgtgttaaaatgtcctgacataagcaatataaaagagatggctttatttggctcacaatgccaggttactgtccatcattgcagagaagtcaaggcaggcacaaaaagcagctagtcatgtgacacccagagtcaagagcagagagacatgaatacacgaatgcttggagacagaaggcattctcaagggagtagggacaatagacatttgggcaactttgggtaactttagaacctgctgggatccgatctatctatctatctatcgatcacttccatttgatggtagattgctggtgtgcatatgctactttatggcttgatggctcagatgacacagatgacacaagctcaggatagggagttcaggttgcatggtaaccctggtggcctattgtcaagtgttcagttcccaccacagcccagtagcaggtcgagagctgtctctcaaagggagaatagttgtctgcagatgatggcaaattcttcctcgagggattctctcgtggttcacctatagaggcttgccacaggctccaagcagcacctctgactgccactgccacctcaagaaccattgagtttgctggatcgtgtgaccaagtggcaaagcagcctagacctgttgaagagcctttgcctgtcccaggtcccactcgaagctagcagcttgccaagtcacttcgtagatatcggcccaagcgacacacccaggtgaggaatgtgctgtctccagaatccaaatagacccactaggcattgtgcttctttcttgatggtgggagggaccaggtacaacaacttatccctcactttagaaggaatatctctgcacgcctcatgtcactgaactcctatacatttccctgaggtagaaggcccttgcattttggttggacttaattcccatcctttgatgcacatacgtgttaccaagttcagagtggttgcaacctccagcttacttggtccaatcagcataatgctatccaatatagtggatcagtgtgatattggtagaagaggcaggtggtcagacctcttcaaactaagttatgacacagggcgggagtgttaccatacttttaaggcaaaactacgaacacatatagctggtctggccagctgaaagcaaactgcttttggtggtccttgggctgagggaaaaaaaaaggcatttgctagatcaatagctacataccatgtgccaggagttgtgttaatctgctcaactaaggacaccacatctggtacagcagctgcaatcagagtcactatttgattagttctgtgatagccaactgtcattctccacgagccatctgtcttcttcacaggccatacaggagagttcaagggagatgcggtagaaaggaccacctctgtatctttcaagtccttgatggtgacattgatttctgtgatccctataggagagagctgagacctgctgaggtgcttgcagtgggtggagcaagtatggaatgggtggtagagaaaagtagtcatagctaccagccaaggtcacggtgatctgctacagaagtgagggctgtaattggcctaagcgcttctgtcttattttgttacaaacatgtttagacatagatccattttgttaagaacacgcttacacatatattaagccaaactccatgttttctttgcgtttacttatttattgtgtgatggaatattgatagagacggtatccacggttaaagtggtgtaaatctacattatcatatttaagtgataagacactaaaagatgaagcattcaagacactttgcctcctatgctgaggggtacacctgcagttagaggtggagcagctatatcatgctatacagaattgtgatcctgttatcactttcatttggaaagttagcaaggtcaaaggagatgcgattggatggcaagaggggtcaacttatcttagttgtcaactttactagatcttggatcaggccaataggcaagccattggacattcctgggaggaattttcttgattagttgaaatgagaagactcacttggaatacgggtggcactttctgaaaacttcactgagtgcggacaacacggttggcatttcgatgttgtggacagactgtgctgacatctggcctcttgggctttcttaacacagactggtgagccagtggctctccaggaattctacatgccttcagtgcctgattgacagctcgcccctccggtgtgaaggtagccatcattgcatggcccagatgatatcgtgtaagttaacctaataaactcctctttaacacacacacacacacacacacacacacacacacacacactcattctattagtttcattcctctaggaaaagacagatgagaggaagcctgtctttcctgcacagaacgtgaaagtcatctgcgtggctgctgcaatcattttgtggccatgaggcaataggcccaatattaaagccaaaaactctgacaggtactaatcaagaagcagccagccttgttatgacttcattaaacgtttgtacctccaggcttcttgttaggcaaggtaattaagtgcctggttttttttttttttttttgaatgtcagcacgttgggtgtcctgctcttagaaaagtagatctggtagagtcaaccagtttagggctcctcgaagtttatcctggatacaaatcaaccagaccagaactcttgctggagttcaggtgctgattcttagtggacctgaggcatagttgcaatgaggtttagaattcttgaagcctgcaggtgcttcattccctgtacagcgaatggtcactgatcatccaagcaggagcctgatgagtgtaaagaaaatataagaacaaacttctttttaaaaattaattgattcattaattaggttactcaagacagggtttctccctgtagtgttagctgtcctggaactctatctgtaaaccaggctggctttgaactcacagcgctccacctgcctctgcctctccagggctgagagccacccagttcaagatcaaatttcttttttagatttatttatttattttatgtatgggagtaccctgaagctgtcttcagacacaccagaagaaggcatcagatcccattacagatggttgtgagccaccatgtggttgctgggaattgaactcaggtcctctggaagagcagtcagtgctcttaaccgccgagccatctctccagccacagcagcaaagaatcctggaagatgtgacttagttgctggagtgctagcaggcacgacgctctgggttccatccccaggaccacacagtggtgtggtgatgcacacctgtaatcccagatagtaaacggaggcaggaggatcacaggttctgtgtcaatcacaggtacatagagagtacaaggccagcctagacgaaataagaccctgtctcaaaaaagagggggaggaagaaagatagggatgctgagttacagctagtctggcccctctggagcaaagagaatatagttcaaattcttcctgaaattccaaccctctgtgttgttctgttactggacagtttcttaattgttactggctgtcaactcgaacccaaaccctgtatcactttctttcttttttttttttttttaagcaacctcgagtgccatttaatatcactgctgcattgttaccacagaaagctgggtagatcacgttaggggtgaaaacttcccagagagtgtcaacttgttgactctattgctccctaatgagggagcagagatgtccattcaaggatgagcagatggggaaagaaggatgagaagctggaggtggggaagggctgattagaaggagctgaggtgtgaacgcaagccttctttcttcatgggagtcatgtgggcgtggatctgccttgtgggtgctttggcatatgaaggacacagccaccacagttagaagccagtcggacagagtgggggagggtttcatacagtggtcgctgcccagatgctcccgagaatctgatcttggttgctcccataattcagcctcttctgacctctgacctctgcctcctgccgcttcctgaattctaaagtcatcaggactggggtcctacgctttgcctgcttcttcatcttcaacgagaagtgtctagtaggacctttgcctgatgcatgaaagtattatcagtcacacaaaatccagaactcaagaaagacttccttgatatttaatagatttaatattctcttcttcgtcccagttttagactgtcttgagctatgcaaggttctctgggagttctccctgtatcactttcaacctgcgtcctcatggctatttcctgtgagttctgagtctatgactcctccttggtctgattggctttc

SEQ ID NO: 266 - DNA, 2871 bp, Mus musculus
atgcaacacccgggcccgcgcctgtggctggtgctgcaggtgatgataggctcgtgcacggccatcagctccatggacttagagcgccctggagacggcaagtgccagccggtggagattcccatgtgcaaggacatcggctacaacaccacccgcatgcccaacctgatgggtcacgagaaccagcgcgaggcggccatccaactgcacgagttcgcgccgctcgtggagtacggctgccacagccaccttcgcttcttcctgtgttcgctgtacgcgcccatgtgcaccgagcaggtctccacacccatccctgcttgccgggtcatgtgcgagcaggcccggctcaagtgctcgccgatcatggagcagttcaaattcaggtggccggactccctggattgcagcaagctccccaacaagaacgaccccaactacctgtgcatggaggcacccaacaacggctcggatgagcccagccggggctctggcatgtttcctccgctcttcaggccccagaggccccacagcgcgcaggagcacccactaaaggacgggggtccggggcgcgcaggttgtgacaacccaggcaagttccaccatgtggagaagagcgaatcttgcgcaccgctttgcactccgggggtggatgtgtattggagccgcgacgacaagcgcttcgctgtggtctggctggccatctggtccgtgctgtgcttcttctccagcgccttcaccgtgctcaccttcctcatcgacccatcgcgcttcaggtaccccgaacgtcctatcatcttcctctccatgtgctactgcgtttattcggtgggctatatcatccgcctcttcgcgggcgcggagagcatcgcttgtgaccgggacagtgggcagctgtatgttatccaggaaggactggagagcacgggctgtaccttagtcttcttggtactttactacttcggcatggccagctctttatggtgggtggtcctcaccctcacttggttcctggctgctggaaagaagtggggccatgaggccattgaagccaacagcagctactttcacctggcagcttgggccatcccggctgtgaagactatcttgatcttggtgatgcgcagggtggcaggggatgagctcactggtgtgtgttatgtgggcagcatggatgtcaatgctctgaccggcttcgtgctggtcccgctggcttgctacctagtcatcggcacttccttcatcctgtccggctttgtggctttattccacatccggagggtgatgaaaacgggtggggagaacacggacaagctggagaagctcatggtacgcataggggtcttctccctcctctacactgtgccggccacctgtgtgattgcctgctatttttatgaacgcctcaacatggactactggaagatgctggccacccagcacaagtgtaagatgaacaatcagaccaagacacctgactgcctgatgaccacctccatccctgccgtggaggtcttcatggtcaaagtgtccatgctgctggtggtgggcatcaccagtggggtgtgggtctggacttccaagaccctgcagtcctggcaacacgtatgcagccgggggctaaagagaaaaagccggaggaaaccagccagtgtggtcaccagtgcagggatctacaaaaaagcccagcacccccaaaaacctcaccttgggaagtatgaactgcccgcccagccttcagcctgcgtgtgaaggcagagctggctgcaagaacaggacattcggagcccaaatgggcagcttttcttggttggctggttgttggtaaatcaaagtaaaaagaatatgtatatatatatacatgtatgtgtatgcatgtgcatatatatgcatatatttacacatacatgaagtctaccttgaggttcagaacagctgaatgtaaagggttctgttcagtttgttgcctccctgaagggtcgctcattaaggagggagcctcttgtgtaactaatttgtggtaaagtagttgattcaaccgccctccagaaaacttttgtttaggcctcaagcacacagctgtgtattcagaaggctttgctgcctgtgcataaacttgaggctggagagctcctttgtaagctaaagagctttcctggggggggggggcagccagtgagccacccaagggcctgctctccctccctcactcccccagctaggctgctgtatgggtgggagggaaggtgaggaggagaggggataaaagaggtgacaccccccccagcccaaggtctgcctgcagatcccttaaaagagagtcacttccccagccttcatagccatgtttctcccaacacagagcccacgctaccctctcaccccactgcagatctaacactggagaattcaaatggtgtgcaatacttttttttttttttttttacattttccccctctccctagcaaaacaaatgagagagagaaaaagtattttgttgtaaataaaaggcaagaaaagaaatcatctaacaaaagaatttagaggctcaagcctcagggttgggggttgggggggcgccttcagcctgatacattttgtggctttttaatggaaaccaagccagtgtgttctacacactgggactgatttgtggagaggaagggggagggggggaagccagtggagagcaccagagggcttattgactctctgaattgttaaacaaatgatttccatgagtggtcttgaagcacttgggaagacaaactttgtctccagccagggagggccatgcctgcctctgtatatctgtaatataggatatttttcatgctccactattttattaaaaataaaagacattctttagt

SEQ ID NO: 267 - DNA, 1749 bp, Mus musculus
atgcaacacccgggcccgcgcctgtggctggtgctgcaggtgatgataggctcgtgcacggccatcagctccatggacttagagcgccctggagacggcaagtgccagccggtggagattcccatgtgcaaggacatcggctacaacaccacccgcatgcccaacctgatgggtcacgagaaccagcgcgaggcggccatccaactgcacgagttcgcgccgctcgtggagtacggctgccacagccaccttcgcttcttcctgtgttcgctgtacgcgcccatgtgcaccgagcaggtctccacacccatccctgcttgccgggtcatgtgcgagcaggcccggctcaagtgctcgccgatcatggagcagttcaaattcaggtggccggactccctggattgcagcaagctccccaacaagaacgaccccaactacctgtgcatggaggcacccaacaacggctcggatgagcccagccggggctctggcatgtttcctccgctcttcaggccccagaggccccacagcgcgcaggagcacccactaaaggacgggggtccggggcgcgcaggttgtgacaacccaggcaagttccaccatgtggagaagagcgaatcttgcgcaccgctttgcactccgggggtggatgtgtattggagccgcgacgacaagcgcttcgctgtggtctggctggccatctggtccgtgctgtgcttcttctccagcgccttcaccgtgctcaccttcctcatcgacccatcgcgcttcaggtaccccgaacgtcctatcatcttcctctccatgtgctactgcgtttattcggtgggctatatcatccgcctcttcgcgggcgcggagagcatcgcttgtgaccgggacagtgggcagctgtatgttatccaggaaggactggagagcacgggctgtaccttagtcttcttggtactttactacttcggcatggccagctctttatggtgggtggtcctcaccctcacttggttcctggctgctggaaagaagtggggccatgaggccattgaagccaacagcagctactttcacctggcagcttgggccatcccggctgtgaagactatcttgatcttggtgatgcgcagggtggcaggggatgagctcactggtgtgtgttatgtgggcagcatggatgtcaatgctctgaccggcttcgtgctggtcccgctggcttgctacctagtcatcggcacttccttcatcctgtccggctttgtggctttattccacatccggagggtgatgaaaacgggtggggagaacacggacaagctggagaagctcatggtacgcataggggtcttctccctcctctacactgtgccggccacctgtgtgattgcctgctatttttatgaacgcctcaacatggactactggaagatgctggccacccagcacaagtgtaagatgaacaatcagaccaagacacctgactgcctgatgaccacctccatccctgccgtggaggtcttcatggtcaaagtgtccatgctgctggtggtgggcatcaccagtggggtgtgggtctggacttccaagaccctgcagtcctggcaacacgtatgcagccgggggctaaagagaaaaagccggaggaaaccagccagtgtggtcaccagtgcagggatctacaaaaaagcccagcacccccaaaaacctcaccttgggaagtatgaactgcccgcccagccttcagcctgcgtgtga

SEQ ID NO: 268 - DNA, 22804 bp, Homo sapiens
agtctcggcgtggccttctctcatatcttacatctccctccgtctttctcttacaacatcaccagtcattggatgtcaagcacagccggataattcagggtcacgtcctctcaagatccttaacatgattacttctgcagagacgtaatgtagagctttttccaaataagatcacagccacaggttcccaggatcaggacgtgaacaggtcttttgggcgaacaccatttaactcgctagaagcactcagcgagcagctctcagaaacagtggctctgaggacagcagctgttaggattgtcagttctctgcctgtctctaccctccctaattctagggagaaacttcatttactccacaaaccctaggactccctaaacctagctggggtctctcctgcatagaatttcagaatgcttaaaaataaagctgtacaaacgtgtagatatgaaaagtcgtggagtgggtgccagctttttgccattggtcgtggtggcgttttattgtttctctcttagggaaaactgtaggatggagtagaagaatgagttttctggcagggtgcagtggctcacgcctgtaatcccagcactttgggaggctgagggaggggcggatcacaaggtcaggagatcgagaccatcctagccaacatggtgaaatcctgtctctactgaaatacaaaaaaaaaaaaaaaaaaattagctgggcttgatggcacacatctgtagtccaggctactcgggaggcagggaaatcacttgaacctgggaggcagaggttgcagtgagctgagaccgcaccactgcactccagcctggtgacagggcaagactctgtctcaaaaaaaaaaaaaaaaaaaaaaaaaaagaagaagaagaagaatgagttttccatcaaaatggacagccttggtccatggtcaaaatggacagccggcccaggcttgcctggtggccctctaagcagaatccaatccctgctgaccgtggcctcttctgcctccggggtccaagccaccagcctatctcctctgaaccactgtggctgtctcctaactgtttctctgcttcactctttccctgccactatgtgtccttgatgcactagccagaagggtcctgggaagactgaagtcagagcatggctctcgtctctccagaaccctccgtggctccccatttcactcagagtcaaaatcaaaaggcccatagacgccatcatggcccgatttctttccctcccacttcctctccacacacctcttctgtcacctaccttctgacgctggcccctatgtcctgacttccagccattggccccattgttcttcctcaaaaaccccaggtatagtggcacttcagggccgtggcactggcagacaccccattatcccagcaggcacttctagaagtgccctcagctctctgcacccactcctggtgtctttgctcagtggtctccttctcatccaggccttccctgcccatcttgctaaaactgcagcccccctttcctagctctctggatggcatgagccgctcacctgccccgcacgccacgcaccgtggaacaggctgtagcacgcacatgtgcagaccccggcctatcgcctcctcctactggaaggtgaactccatgagggtgaagacatctgtccttctatcccctgctctgttttaaccatctggcaaagcaagcacactcagcgcagcacttattagaagggagggagcagaacaactattctgggactgacttcctgctggaggaggaacagaaaataaatacataagcagatgagtaagatcatcgacgggcagaaaaagtaccacaaacaaaataagagtaagactgctccgagacaaggggctggggagggggaacctgagtaggaggcagcctagtggacgcgtcacccaggagcagacatcgttcagccatgaggaggcgggggatgcagcctcctgatgtgtcagctctgaaagctaatgactgtgcctgcgtgtgtgcgcatgacatgcgtgagctgtaagggcagctccataattagattatatatgtgtgtgcgtgtatatatatgtctgtgtgtatatatatgtgtgtatgtatatgtctgtataataatatgcatacacacgtgtacatatatataacctatatatctctctatatagattatatatgtgtatagtatatacacacatatatattatatatgtgaatgtgtgtgtatatatgtatatatgtgtattatatatacacacacacatatatatgtatacatatataatctatatctcagagagagagactgacctgccagcagatgggcagacatttgtcagacatggagagagtgtctttattcctaaagttggtttctcagctgcaagggcaatggccaagcccttcccaatcttaccttacgaaacaagggtgacaggcattcagggatagcaaaacgatctttcctatcctattttgggccttagagaaaagcgtaattgtgcatttaaactgttgtttgggatgagggcagcagagcacacagctgttggaaccagtttctcttcatgctatcacatgaggctggagcctgaactatctctgggaggctgcagaaagtgggaagggagtttcagatccatgctggaagaacagggaaaggctcccgcagggctccgggtggtgtctgccgctgattcagcaaaggacttgtcctggacacggggcatgtgggagctgagcacgggatttcaggtcctgcttcacctccttctcatagggaagaagctgtccactgctcactcctggttaaattcaaggaagaagggatacacaagtgtggcagccctatagaaaagagaaagactcgtaagtgatgctattagtaagccatcttggcttccggccagtgaagacaaatgaatttaacaaagaaaagtcaactaaccagaaagtttacagaccagtgaatcccacagggctagcattatgtgccaactcggttctcagagcttactgagttatctcacttcattcctaccccgaacctgatcaagtaagtgtcattgttcccattttacagcagaggaaacagaaagaatctcagagaggttaagtaacttgcctggggtcacacagctgaggacatgggtaaaccaacacacattaatacctcccacattgcttcttccgccatttcctccctgtttgtggctccaaagaatcccttcagacaccatcacggggaatatcaacatgacaggaaagtggcagcctcgccccaggccaggagcccctgaacaaagccataaaccaagacttgatctttgcctggctccagacaggacagcagaacggggtcccattctgaaagtcaggctccatcacaagtacccactgtgcttgcatctccgtggagaggcaggaggccaggcgtaggcagctgagcccctgggggagtggaatggtgtcggctctacccccagtagccccgtggcctgggtctagtgactcggactccccagccccagttgctcctctctgaaatggaaatcttctctggaccagcttcctggggtacctatgaggaggcagtgagctgcttcctatcaaggcttaaggcagcacctgtcaaatgcttagtcagcctcggctcttgttagccttttgattatttgcttgccttgattatcagcttgtattactgtgtgcctgacactgacatgtccccaaactcctccccacaaatgtcacattccagtgcctctccttattgtgctctctccctccatttatattgcatttcaacaataataaccgctactcatcactgagcacttatttggtgcttggtattgccatcaacgcttccaagtgtgttatgacatcatcctcatcgtgccttgggaagcgggaactctgctggtcccattttgcagatgagaaaaccgaggcagagcaattagaagtggcatatctgaggtcatggggctagaaagtggaagagggggattcagacccaggcatccgggtcgtttcctccccagatcatcactgtggtgcggggctgctcaggcgtttggtgagtggctgcagattcagagctcacctaaggtgaaaagcaggaacggggttccttctcatttctttgtaaggcagagccaagctcgtgggtgtccccactctgtccctgaagggatagtttctctgtgtcatctttgcctcctctgtcacccatgcaggggccgcaggcctgtgatgagctgacccactcagctcccagaacaggcaaaagggtcccagggtgcaggagggaagccgaaagaaaacagatgggaaggggagtaattaaatcagcacatcccaaacagctaagggaggggacaaggagcaaagcaatgaagaccaggtatgaagtctgaactcacagaatgggcacgcgcttccgataagctgtccgctcaagctgtttggaatacaaacaccaaccaaaacaacacacgcacacactcttttgtgtcgtgtttctggaattctgtgatgtttcttttctcatatattcctccaaaaacagtccagtacagaattgcaggttgaagcactgtgaataggctctaggtttgccccaggttaagggttaatttgttgagtttcagaacaggtaggcgacgccctcctggattttaaacagataacgtccttgccatgtaagagcacttagaaggctggctttatctctttaaaaaaaaaatatatatatatatatacacacacacacacacacatatatacacacacacatatatatacacacacatatatacacacacacatacacacacacatatatacacacacatatacacacacatatatacacacacatatatacacacatatatacacacatatatacacacacatatatatacacacacatatacacacacatacacacacatatatacacacacatatatacacacacatatatacacacacatatatatacacacacacacacatatatacacacactatatatatatatatgattgtgtttgttgttgttgcagttgcagagatgaaaaagaaatctgtgtctttaaatgaggaggggctgcgtaaggaggcttgggcagcaaaaaggctaatacgctgtggaagagaaggagtttaatctaatttagttggagggtgtctgtctgcggtgttgttttttggagtgtgggaatagaggcgggaagctgcccccttgaatggtccctcctgagccaggagcagtggggagccagtcgacgccagcgatccaaagcccggccttgaaagaggattaaatcaatgctctgatttgcaattcacactagtgcaccccgtggaacctttggtaatatttcaaaccacatttcaagggaagtggccttaaaatagctgcctaaattgtgctggagccacactggacaccccactcatccactttaggatgggggtgcttcggggttcatttctcaccttcccccaaacctccacatctcacagccagtgtttttaggcagaattaaaacttttgcgcctgttgaattcgctgcgacttgcatggcctttctggtggtacaaactgtgttttctttgctaagtatcacttcagatcactaaaggtattttccctggagaaaaagatgggggcacgccacggggagcatgcctacttgatcagaaaacataattttttgtgcatgttttatatctgataagtttctgcagaaacttgatactagatgaggtcagagaaaacaaggtctattcacatcagacttccctgcatgtgaagcaattattggtaaatagatcagttttcattctcatacttgaaggtagaattggaaatgtcccggactaaatacaaacattgacgacacgagaagacaagagaagaaacacaagaatcacttacgtggatcctcacacttgaatgtaccaagagaggtgattcaagcagcagctaccgaaaggcgttgcgacagcctgaaccactttttatctcaacattcaccagcacgattttacttctgtttatgagctttcttcctatgccaccagtttactcttgcaattagcttgtaacatgctaagcttatggtttaatttctttctgttgctgaaagactcagtacttttttatcttaaagagattatttgggttttctctaatcccatttcagaaaacctcgcacagtgcttataatttccattgactattacataataagaaaagatacaactttgatttttagcaatatccgtgtcaaagtacttttatacttttgactttgtgagtttaaatggaatgaaactgggcctctctttcaattcccctccacctccaaaaaatatttagttcttgttcaaaacactgcctgactcctgaaatattctctctcaaaaacctcatactttccctggtgaacgtttgcaagaacctgaaggcggataatgtttactgatagctttccgatagacagacatttttaggtggttgggggtaaaaacatattccttgtctctgcacgttatgtgaaatcatgtttaattataaagtttcattaaaaatctttgctcaaaattttagaagcctaataagatttccattaatttaaacatatcactattcccacgacggctccaaagctttcttttccgtctttcatccatggttaaatatgtaaataaaatgtctaaagtcattcttcaaagaagacaaaagaaaaaagagctgagggaaagacagccataaaattcctcccaattctccataacatttgccagaggggggtcggttgccagccagggctgagcagcgggggaccccggctgctccttagactcacacatctcaaatcccacacacaggaaaaaaaataaaataaaatatcttttcagctggggccatcaaaagagccttttcatttattagttacagacttatcttccagttgctgatttctcagaaccctcatttctctataataaagtctatttgttggtttccatctcagctggacagggcgaagcacttctgcagacatttttataaaaaacgagagaaaaaggcaatctgaagtggttatagctaaaataatgggcctgaacgtggctgaattaaaacagcacagaaaagatcaattaggaggcactttctcaaatagctcacacccagctcccggcgtttggctctcactcttgcactaaatatttctaatagttgctgagggagagacacaaaaaggaaaagaaggaaaatagggcccaggaaggacctttgccaggaaaattctagaaaagccaagtgatttccgctgaattaattttaatttaaaggtcctgaaaaattactcactagacaaaaaacaacaacaacaaaaaaaaaaacactataataaaaatggcagtctttcaaaaataaaatcatgcaacttttcacttgggaaataacacagttgaaggtggtgttctaactgcccggagtttctaccttctttttcactttctccctcaccccgacttcctccagcacctcctagtgagacccaggacacccagggacagcgacccaggggtgggtgcctgaacctgcctattaattctgggattctgggcgctcaaatgtctgttgaacggatgaatgaatgagtggaaaggtgagatttccccaagtttcttaccgatgtaaaaattgtagggcttgttttaattaaaagccaatactctccgaggaagtggccccctcctgcacggcgtgcagaaagctggtcagtgaggggggttcctggcgggccccatctccttcccgggcgcttcctagggagaccttgccccgtgcgcagcgtccccaccgcgggggcccgtgcagccgccccccacgccgggtggagcgccgccaacgcgggaagccccagcactgcctccaaagatgtccgcacactccaccctgctccctggaactatcctcaaacgggcagggggcaagcgaggccggtggacgcgggactcgctcctctgacctctccccggccccccgggaggtagcgggagattgcacacgcgatcctgcgagtttccgaactttggaagatcgtgacccggagagaccctgggaggagagggccggccacctcctaggggtgctgtttttttaagggtcaacccaggacgctacgggaagcacctggcgcatccttgggaacagtggggcttggcggtgggcgcccaccgcgaacgccctgggcgggggaagggaatggcggggggacgtcgtgtcctaagtgaccccgtcacagacccgccccaatccgaggggggatgagctcagaggacctgcccaggacgctccttctccactttccaggaaaaccgagcggcgtgcgcgcctccgtgtcctcgcgggagctgggggtccccgggcaggcgctgacgcgctcctcccacgacccactccatcccaccctactccgggtcctcctgcggggctgcagccaaggagggcgctggccgggcacatcactcgccaaatcacataaataccccacgagcgaatgacttcctataataaataaactcagccgccaagaaggcatctccagccctgctggcgcgaggccccggctctgcggcttcggagggggcgggggtcaccgcggtacaaaccaagcccgcacttcccgcggggtgggaggcggtgttcaaagtcccgggacgcttcccgcccctcccccttcccgccttcttagaggagacctcggatgagcggccctaaaatccggattctcgagcccctccccctccccttagctcgtctctttgaaatttcaaagaaaatccctcctcggagcccggagcccggggctggtagcacctccccagcctcaggaagatgcgggcaggtttacaagcaagggcctactttatggcccaggctataaaacgcaaatcccacctccctttgaaagcgccctccgcccgggactcaccataaaaggaagagaagatgcaccccgcgcccctcgccgcggaccacccccaaaccccttctcccgccagtccccgaacttcccgtaacctcggcgtcctcggggtgccggggaccatcccggggaccgccgggaaagggggcgccggcggagaggatagcgagaggcaaagttggaggccaggcagagagagggcgaggagaggcgggcgggactgccggggagggtcgcagcgcgcagagccccgcgcgccaggcgggctgtcccggggctggcgggcagacgcgggcgggactaggcgctgcgccccccgcaggctgggctgcaggccgggggggatcggcccccgcggggcccgggagcccgcggcggggcggcggggaggaggctgccccgggccgctgcgctttctcatgcaaagcagcggcggtgcggggcgcgcggcccgggggcggggcctgtcagcgctcggcttttctgcccccctttgcctttttgcgagtcttctcatcccgggacgcaaacctcgaaacagctgccggctggtcccggccgaggccggcgcagggagggaggagccgcccgggctgtgggggcgccgcgagctgggccggcctcggtgtgcccgcgccgccagcccgctccagacgcgccacctgggcgctccaagaagaggccgaagtttgccgcggccgtgagttggagctcgcgccgggccgctgcgccgggagctccgggggcttccctcgcttcccggtattgtttgcaaactttgctgctctccgccgcggcccccaactcggcggacgccgggcgcggagagccgagccgggggcgctgtgcgcagcgctcgggccaggccgggcgggcatgggcgggggcccgagcaggggtggagagccggggccagcagcagcccgtgcccgggagcggcggcgctgaggggcgcggagctccccgcgaggacacgtccaacgccagcatgcagcgcccgggcccccgcctgtggctggtcctgcaggtgatgggctcgtgcgccgccatcagctccatggacatggagcgcccgggcgacggcaaatgccagcccatcgagatcccgatgtgcaaggacatcggctacaacatgactcgtatgcccaacctgatgggccacgagaaccagcgcgaggcagccatccagttgcacgagttcgcgccgctggtggagtacggctgccacggccacctccgcttcttcctgtgctcgctgtacgcgccgatgtgcaccgagcaggtctctacccccatccccgcctgccgggtcatgtgcgagcaggcccggctcaagtgctccccgattatggagcagttcaacttcaagtggcccgactccctggactgccggaaactccccaacaagaacgaccccaactacctgtgcatggaggcgcccaacaacggctcggacgagcccacccggggctcgggcctgttcccgccgctgttccggccgcagcggccccacagcgcgcaggagcacccgctgaaggacgggggccccgggcgcggcggctgcgacaacccgggcaagttccaccacgtggagaagagcgcgtcgtgcgcgccgctctgcacgcccggcgtggacgtgtactggagccgcgaggacaagcgcttcgcagtggtctggctggccatctgggcggtgctgtgcttcttctccagcgccttcaccgtgctcaccttcctcatcgacccggcccgcttccgctaccccgagcgccccatcatcttcctctccatgtgctactgcgtctactccgtgggctacctcatccgcctcttcgccggcgccgagagcatcgcctgcgaccgggacagcggccagctctatgtcatccaggagggactggagagcaccggctgcacgctggtcttcctggtcctctactacttcggcatggccagctcgctgtggtgggtggtcctcacgctcacctggttcctggccgccggcaagaagtggggccacgaggccatcgaagccaacagcagctacttccacctggcagcctgggccatcccggcggtgaagaccatcctgatcctggtcatgcgcagggtggcgggggacgagctcaccggggtctgctacgtgggcagcatggacgtcaacgcgctcaccggcttcgtgctcattcccctggcctgctacctggtcatcggcacgtccttcatcctctcgggcttcgtggccctgttccacatccggagggtgatgaagacgggcggcgagaacacggacaagctggagaagctcatggtgcgtatcgggctcttctctgtgctgtacaccgtgccggccacctgtgtgatcgcctgctacttttacgaacgcctcaacatggattactggaagatcctggcggcgcagcacaagtgcaaaatgaacaaccagactaaaacgctggactgcctgatggccgcctccatccccgccgtggagatcttcatggtgaagatctttatgctgctggtggtggggatcaccagcgggatgtggatttggacctccaagactctgcagtcctggcagcaggtgtgcagccgtaggttaaagaagaagagccggagaaaaccggccagcgtgatcaccagcggtgggatttacaaaaaagcccagcatccccagaaaactcaccacgggaaatatgagatccctgcccagtcgcccacctgcgtgtgaacagggctggagggaagggcacaggggcgcccggagctaagatgtggtgcttttcttggttgtgtttttctttcttcttcttctttttttttttttataaaagcaaaagagaaatacataaaaaagtgtttaccctgaaattcaggatgctgtgatacactgaaaggaaaaatgtacttaaagggttttgttttgttttggttttccagcgaagggaagctcctccagtgaagtagcctcttgtgtaactaatttgtggtaaagtagttgattcagccctcagaagaaaacttttgtttagagccctccgtaaatatacatctgtgtatttgagttggctttgctacccatttacaaataagaggacagataactgctttgcaaattcaagagcctcccctgggttaacaaatgagccatccccagggcccacccccaggaaggccacagtgctgggcggcatccctgcagaggaaagacaggacccggggcccgcctcacaccccagtggatttggagttgcttaaaatagactccggccttcaccaatagtctctctgcaagacagaaacctccatcaaacctcacatttgtgaactcaaacgatgtgcaatacatttttttctctttccttgaaaataaaaagagaaacaagtattttgctatatataaagacaacaaaagaaatctcctaacaaaagaactaagaggcccagccctcagaaacccttcagtgctacattttgtggctttttaatggaaaccaagccaatgttatagacgtttggactgatttgtggaaaggaggggggaagagggagaaggatcattcaaaagttacccaaagggcttattgactctttctattgttaaacaaatgatttccacaaacagatcaggaagcactaggttggcagagacactttgtctagtgtattctcttcacagtgccaggaaagagtggtttctgcgtgtgtatatttgtaatatatgatatttttcatgctccactattttattaaaaataaaatatgttctttagtttgctgctagtccctggttcatggtgaggtttcccttctctgtgtgtggagagactacaggacactttctccctttgctttttaagcaaattctggggttgtgcttctagccagagagtactggttatctgtataaaattgcagatcagaggattccaagattggaagaatcattcacttgtgagtttctgaggaactgcagtcaggcaatgtgtgaagttggaagtcgtttctgtgactgttggtagctggacatgagggcttagttgtagacacacatcaccaaggagagcctcaccactaagcgtggacccactcatgagcctggattagccagttttaatatattcagagagtagagccaaccgattaggagaattaaatcatctgtattcaattgacctgctaggctcaaatggtacctagacagagctgtatacatcagcccaaagtgtgctggctttgcagtgactctgaactatgaagacatttacaaaacagattatagacctggacgggataaaatacctgctaagggtggcgaatccttaagaggaagttaagcagctttggaacttcatggtacttggttcttctccagggtttcctgttagaactgggtagctgtaaagaactgccccaggtctgctggtcaaaggcacagctacactcaagttccagccagaaggaagcaagggcacagtgcagtcctactgtggtgaggactctattaatataaagcaagccaagctgcccctggggccatgcttttgtccagctccaagttaaacaaggagctctggaaaacttggagcatggatgacacgcttaccaacgaggaggagagcctggagctagtgcagtctgttttctgaagagggtgttcagaacttcagcctggtaaacataagatcacccatcaacactagggctggaaacaggcttacattggctttgaggggctactgcacttggccgtgaatatttgcagggcacaggagcaggcagatcggtggtttgggatcaagtttgacaaacggaggaaacaccagctaggtaggcaaagtaaaagaatgcaagatcccaaagagctttcagtgcattaaaaaagaaggcagaaaagcttcagaaatgcccccaaataaaatttctttgttgattgttttcgcctagtcccccaaaagactacatagaaatattgatgtctctgtgcatgtatgggtatagcgtttcctttttgtcactcttagggaaaatgaaaataacatatttggaatagaactttcaaaaagtccagaagggtaacattgtccggatgctgctgtgagccacaaggctagatataacacaaagacatttggttctaaaattcctggactacagcagcttcagacctgcccatgctcaggtgtgtaggctcgaaaatgtggtcccaaggaaagtcatattcaacaacatacctaagagcctttgttgttagttatccctgaatgtgtctcactgtggatccatcccagaaatgactgatcttgtttacgaatgtgaagggattgtgacatgtggctgggttgggcgcagctgggtgagtttaacagtgagcagtgcaaggagcagctgtagagcttccaagcaaaatgctccaaggtcttcctctccctctctctctctcttcctctctctctctctctctctctctctactaagctgaaatctgaccctccctcacatacagacagtgagttttaggagaagcatcaaggccttaagtcagaaagctggggaaaaaaagaaaggaaagaagggagggagagagggagggagggaggaaagaagcaaggagaaagaaagacaggcaaacatcactagtgaaggaaggaaggaaagaaggaaagaaagaaagacaggcaaacacatcactagtgaaggaaggaaagaaggaaggaagggaggaaagaaagaaggaaggaaggaaggaaagaaagaaggagaaagaaagaaagacagccaaacacatcactagtgaaggaaggaaggaaggagaaaggcaaacacatcactagtgaaggaaggaacgaaggaaggaaggaaagaaagaaaaagaaagaaaaaaagaaagaaagaaaggcaaacacatatcactagtccttagattctctttagctcagtacagggtttccaaaggaattgttgacagcattaatttggagatttctcagcatctgtaccccacggccttagttttagaaaaatggcaacctgttttgcatggcagtggtggagtcatagaagaagcccaaagaagtagattgtccaagatctacatccattcatccctcccttccttcctccagcctccagccaatcaccacccaccacatgctaaggccgagaaacagaactggtacctggtctgtgtgtggttttgcagtggacaggagagacctgcatggcacatcttatatgcgcctctgtgaggcatcagggcaggaggcccaaaagtagatgtatttccacagggcccctaaatgcatacaaggcagaagattcagcctatgtgaggtcatagcaaggggaagctgcagggtcatatagaaggcaagagaagttatcaacagagcatcaaaacattccatcgggacccagactgggtctggctcatgatcccctatgtaagcccacaccttgcagagggctttggacgtagtaagaataactacaataatagcaatggctgtgataatagtaatcgtagcagcacagccttgagaccacttgctgtgtgctgaacaggctgctgggactatctcagtgaatcctcaacgcattcagggaggtactgtcatcagccccactttacatgtgaagaccctgacacagagaggttaagtaaattcccagggtcacatgacaactaaaagacccagaacaggaactgggtggtctgataacagatctggaacccccaattcagtaagcaattgttgaataaatgaatgaatgaacaatagctgaccactttacatgcattaattcaatcctctgacaaactttggtggtactgctctcatgctcataatattacagacgaggaatttggagcacagagaagttgtgtcacttacccaaggtcacacaggcagcaagcagagagtctggcatgcaaacctgggctgtgggactccagacctgcacctctgaccacgaggctttcccacgtctctggtttctcaggacttgactaaatcatttcatcttcacagcagcactgctgcacctttattccaagcaaaaggggaacaaggttgcatggcaaagagcaaaagccacttggccagtgtgggggagcccaagggaggaggccgtggcaacctgcatttttgcagcagtcgcgagggtgctagcagtggggctagggggaagcaggtggatggagaggtccttagaaggtagaaccaggattaggttttatgtagagagggagcaagaaggaatggtcagggaggaccacaccatttctgactttggtggcaaagtgacattcatcaagacaggagaaaaccaacagaggacaggcagtgtgatgggaagcaaagatgagtgcagtgtggattatttgccatcgaggtgtctgtagagaatttgggatgaggtcatggtcacaggcgggtgtttgaaatggtgagagttggagctgtggttaacctcaggaagcaagtgggtctctccagggacagaggagggaggagggcagacctcagggccaggtgaacaaagaggaggttgcaaggggagctgtgactgggagcagccccttaaccacttgggcgctgggtgcccatttttactataagaggattggcagaggagattatgcaaatggccttatccaacgtcaaaatacgtgatccggatagcgctaagggggaatgcagcaagggtcttacaggagtgacttaggaggatccactcctgcccgtgataactcagcctctgtatctttaacttaacccttgggctacccgagcaaaattaaaatcagctccaagagctcatagttttaaattctccactagcatctttggggatgctgtttcaagacagagaaacagaagagaaaaatcaagaagtattcctgaggccatagatattatcctacattctagattattttctcagaaggaggagaaagaaatacagaaaacgataacagattggagtgcaaactggcatcttacacttaaaggatgtgcagatataaacatcgtttaggactgaactatatcttgccttctctatgagctggtttttagtttgactcaaccacttacacattgcttcaccttgagcaagataccagaactttcctgcctctgtttcttcatctgtaaaatgggcatgataatggtacctatctcactggactgtcactcacaaatagctcatgcttattgaacaagtattacatgctcgattgctttaagttctctgtgtttattaattcatctactcctcacaacagccctaggagagatggtacgagattaaataaaaccatttgtgtgaagtacttggaaggctgcttggcgcagagcaaatgctcaataaagtgatctatttttatgttttttgtccctccccccaaagaaagttaaatcctgtaagctaatgagtagggctctttaaagaaaatgagtttttttcttacagaaacactttttccaatactgtgttcaggttccacagaaaacccactgatctttcaagtttaaaaggcaggcacagagcctctacagcagtgaaaaatattctctgtctttccctttgaacacaataacatcacagctgacttcccaggaaatcagacctcatgcacggacacctctatacgcaaatggataaagatggctgtaatatggaaatgcagagaaacggtcagacttcagggaagctcgcgaaacacgtgcaggcagcatagtgtggggtgttttttaatgttttattaagagtgtgaaggccaagctggagggaggagggaaggagacgtttgaaatctgaaagaataagtttcagctgccgaggtgagctgtcgtaattggggacactcctaggaaaatgacactgttggatcccacacaatgtccgcagcccatccggacttccccaaagtcagtgcctgtcgctttgttattctaagactttctgaatgtttctgtttttatatacattgtttggtaccaggctgccctccaggggcctttggtttataggaagggattcataacagcaacccttgccacacgcccatctccttcccagatgctgggggcttcaggggttctgtagatgggatgggatgttcccaggtggtctcttgcaacagatgtcctcaaaggatgcaatttgtggcattttagggaatacttgcacttaaaaaaacatctaaaacctatcctaacaatgttttaagtattttaggcagaactacaaagtgatcgaccttgacatgatgaatcaacacccattttccaagggggcgatggtgatcgggagctgcaggtgctgactttgatcagaactgacaagctcatggggtggtgcagctctctccccaccccagccctccccattccacccctgcccccagggcagcagcacctgtttacctcccatgctctccctgcactattttcgcctctcataaaacacttggatgttgttggctctgaataagatcattcatctgcgaactgcctctcttcctgcagctcatctgaaacagtcttattgaacttgggtcaatatcacctcggtttctttggattccaggatcacagcagaaggctcaaatttgaactaaactcagaagcattttaggtcagcaaaactttttttttccccaagagactttaagtattaggaatctaagtgccaccttacttttccacacatggcacagggtaaagagaacatgagatagccatgaagaagttgtgattctgatttgctatcatgatgacccaggtctaagaagacagaacaaaagcaatgagaacaagagaacacggccaattataacatttgacattcttccatggcagtcatgattgtaaccattttcaattaaaagaaaaaacacaatactacagcaatgttctgagctgaatcttatctcttgagtaaacagagggcctctgagcaaaaaaccatgcaatagaaaggaggcatcaaaagaagttggaaatgtagtatttttatttttaactcacctctaccttctaaaagctttattctttccaagacaaaaagcttcacgcatgtcccaggggatgagccaagaaaaaaaaaaatcaggtaaaataatccctctgggtcaggggcgtgcatgtcactcggtctggtcagtgagatgtgaggggagctttcctagtgagacaaaaaaaaaatgagggtgtgcgtgtgggagtgaaggaaggttctaataaaagattttgcttcatgataaaaaaaaaaaatgatgaggaaacctgtccttttcttctgcacacaatgtggtgtgtgagaatcacatatggagctattgcaaccattttgtgaccacgaggcaataagcccaacaccaaagccaaaattctgagatggcaggtaagcaagacagagccagcctcgtgagcactcattaagcgactgcacccccaggattcttgttatgccaagtagccaacactgcctggatcccctgagagttgcaggttgggtgttctgtgcctcttaggaaaatacacctgatgtggcaaatgagtcccaggtgtctcaaaccctactgtgcacacaaatcactggggctcttgctaaaaggcagctcctgattccttaggtctgggtgggaccccaaattctgcatttgtaataagttcccagttgatgtcgatgcttctggtgctcctgacccctttgagtgaagaatctatttggccacccaccagaagttcagaacgaccccacttactcctggctgtaattatatgaacacatcttgggcatcacttcctgggtgtcctgtagtggactagctgtcaattaaaacaatttcttatgttgagttaaaatttgcttccttgtaactattttctattattatctctacttttgccacatagagcttcacagagcaagtctacttgtttttccatgggaaagccacttatatatgggagcttatcacaaatgcagaatttggggtaccacccaaacctactgactcaggagctgccttttagcaagagccccagtgatttgtgtgcagagtagggttcaagatgcccaggactaatttgctatatcaggtatattttcctaagaggcacagaacacccaacctgccaactctcaggggatccagagagtaatatgtgctccctggatctttctttttattcttaaaactgttgcccagataacttggtttcatcttgctggctgtcccctgaatgtgtttaccatggtctcaattcttgtcaaggaagaatgtgcccaagtaaagacaaatctccaggaagcatctaacaaggagtgggatcattagacacccagcaaatgttatacaagataatgggacactaaaagcatttttactaaaaccagagacaaaacaaggctatctatgattactggtcactacccggaacatgattaaccctgaagtcagagaagaggaaagaaaaaggaaggtaaaaccattggaaactgtcattatttgcagctgttgtcattgaaaagtgacttagctggaaatagaattgatgagattttcataaggagaccaggacaaaacatagctacaaaaatcaatagcatcctcatgcaccagcaggaaccagttgaaaatatgaagaaaatttaagatcacttatgcaatgcctacaacaagcacaaactatctagaaattaacatagggggtgtgcaagccttttggaagacaatgtgaagatgttactgaagagcataaataattggctcaaataattggaagctcatgtcatgtgcctgtaaatatgtcaattatccccaagttaattcctaaacataatgcaattgcaactttaaaatatgtatttctgtggaactccacaagatgatattaaatccataaaatttgagcagtagtcaaggaaaaaaccctggaacagggataagaaaggacataatctatcagtgaagtacactgtgagtctgcagaaacagacagcatgggccaagtgttaaaacagacaaaataatggaacaaaataggaaatccagaaagagtctcaagtgcatttcaaataaataagaaagaatggattacgcagtcaatactgttgaggcttagtttagatgtggggaaagtaatattccatccccacctcatgcctttcaccaaaatacatgttggattgataaaacatttaaacataaaaataatacagtaattaggggaaaatgttatctaaagttttcattcaatagaaagaaattacaggtaaacattttttataaacttatcaggaaaatgtcttcttagcatgacatcaaagctaaagccattttttaaaaatcataatttcactacataaaaatgtaaaattctgtaatgtaagaaatcagttaatttaaaaaaaattgcaaaatctccataaacaaaattaaaagacaaaaacttaagtttcttgtctgggtctatgagtaggcaattcaaattagaagaaatgctagtgacccataaacctgtggaaagttatttaagctcacttctaataatccaagggtgcatgcataaaaaaatgattatttgtgcctaacaggtttccccgttttttttttctttgagacagagtctctctctgttgcccaggctggagtgcagtggcatgatctcggctcactgcaacctctgcctccccagtttaagcaattcccccgcctcagcctcccaagtagctgggattacaggcgtccaccatcatgcccgtctaatttgtttgtattttcagtagagacagggtttcaccatgttggccaggctgcttttgaactcctgagctcaagtgatccgcccgcttcggcctcccaaagtgcgaggattacaggtgtgagccaccgcgcctggccagcttggtactttttttttttttttaaagcggataatacctggattttgctcaggcatggagaaatggactccctgtatcacagagtggaaccataaagtagctcaccctttctggagaacaagtgtgatgtgtacctagtgccgtttgcagtatacatgtcctttgacccagcaattccacttccaaataaatgttgtattgaaaattgggaacagtctaaatatataccggtaagctgactattcaagccaattatggaaaatccttaaaatagagtaacatgtagtcattaaagtaattacgtagaaccgtgtcattaacatgggaaaatggccacacggcactgctaagcaggctgatcttcagacaggacggaccagggcagcccttccagtttgttttgtctggtgtgtttttgaatttgtccacacccctatgccaaatcagttgttgaacatttcaaatattgccctgttgttactacacaaagcaagttatataattcctgaataagacaagcctgggcaacacagggagaccctgtctcaaaaaataaaaagaaagaaaaggaagagaggagggaaaggaaggggaggggtggggaggggagggaagggaaggggatggggaagcaaaggaaggccgggtgcagtggctttcgcctgtaatcccagcactctgggaggctgagtgggcagataacttggggtcaggagtttgagaccagcctgaccaacatggtgaaaccccgtatccactaaaaatacaaaaattagctgggcatggtggtgggcacctgtaatcccagttattcaggaggctgaggcaagagaattgcttgaacccag

SEQ ID NO: 269 - DNA, 2811 bp, Homo sapiens
acacgtccaacgccagcatgcagcgcccgggcccccgcctgtggctggtcctgcaggtgatgggctcgtgcgccgccatcagctccatggacatggagcgcccgggcgacggcaaatgccagcccatcgagatcccgatgtgcaaggacatcggctacaacatgactcgtatgcccaacctgatgggccacgagaaccagcgcgaggcagccatccagttgcacgagttcgcgccgctggtggagtacggctgccacggccacctccgcttcttcctgtgctcgctgtacgcgccgatgtgcaccgagcaggtctctacccccatccccgcctgccgggtcatgtgcgagcaggcccggctcaagtgctccccgattatggagcagttcaacttcaagtggcccgactccctggactgccggaaactccccaacaagaacgaccccaactacctgtgcatggaggcgcccaacaacggctcggacgagcccacccggggctcgggcctgttcccgccgctgttccggccgcagcggccccacagcgcgcaggagcacccgctgaaggacgggggccccgggcgcggcggctgcgacaacccgggcaagttccaccacgtggagaagagcgcgtcgtgcgcgccgctctgcacgcccggcgtggacgtgtactggagccgcgaggacaagcgcttcgcagtggtctggctggccatctgggcggtgctgtgcttcttctccagcgccttcaccgtgctcaccttcctcatcgacccggcccgcttccgctaccccgagcgccccatcatcttcctctccatgtgctactgcgtctactccgtgggctacctcatccgcctcttcgccggcgccgagagcatcgcctgcgaccgggacagcggccagctctatgtcatccaggagggactggagagcaccggctgcacgctggtcttcctggtcctctactacttcggcatggccagctcgctgtggtgggtggtcctcacgctcacctggttcctggccgccggcaagaagtggggccacgaggccatcgaagccaacagcagctacttccacctggcagcctgggccatcccggcggtgaagaccatcctgatcctggtcatgcgcagggtggcgggggacgagctcaccggggtctgctacgtgggcagcatggacgtcaacgcgctcaccggcttcgtgctcattcccctggcctgctacctggtcatcggcacgtccttcatcctctcgggcttcgtggccctgttccacatccggagggtgatgaagacgggcggcgagaacacggacaagctggagaagctcatggtgcgtatcgggctcttctctgtgctgtacaccgtgccggccacctgtgtgatcgcctgctacttttacgaacgcctcaacatggattactggaagatcctggcggcgcagcacaagtgcaaaatgaacaaccagactaaaacgctggactgcctgatggccgcctccatccccgccgtggagatcttcatggtgaagatctttatgctgctggtggtggggatcaccagcgggatgtggatttggacctccaagactctgcagtcctggcagcaggtgtgcagccgtaggttaaagaagaagagccggagaaaaccggccagcgtgatcaccagcggtgggatttacaaaaaagcccagcatccccagaaaactcaccacgggaaatatgagatccctgcccagtcgcccacctgcgtgtgaacagggctggagggaagggcacaggggcgcccggagctaagatgtggtgcttttcttggttgtgtttttctttcttcttcttcttttttttttttttataaaagcaaaagagaaatacataaaaaagtgtttaccctgaaattcaggatgctgtgatacactgaaaggaaaaatgtacttaaagggttttgttttgttttggttttccagcgaagggaagctcctccagtgaagtagcctcttgtgtaactaatttgtggtaaagtagttgattcagccctcagaagaaaacttttgtttagagccctccgtaaatatacatctgtgtatttgagttggctttgctacccatttacaaataagaggacagataactgctttgcaaattcaagagcctcccctgggttaacaaatgagccatccccagggcccacccccaggaaggccacagtgctgggcggcatccctgcagaggaaagacaggacccggggcccgcctcacaccccagtggatttggagttgcttaaaatagactctggccttcaccaatagtctctctgcaagacagaaacctccatcaaacctcacatttgtgaactcaaacgatgtgcaatacatttttttctctttccttgaaaataaaaagagaaacaagtattttgctatatataaagacaacaaaagaaatctcctaacaaaagaactaagaggcccagccctcagaaacccttcagtgctacattttgtggctttttaatggaaaccaagccaatgttatagacgtttggactgatttgtggaaaggaggggggaagagggagaaggatcattcaaaagttacccaaagggcttattgactctttctattgttaaacaaatgatttccacaaacagatcaggaagcactaggttggcagagacactttgtctagtgtattctcttcacagtgccaggaaagagtggtttctgcgtgtgtatatttgtaatatatgatatttttcatgctccactattttattaaaaataaaatatgttctttaaaaaaa

SEQ ID NO: 270 - DNA, 1746 bp, Homo sapiens
atgcagcgcccgggcccccgcctgtggctggtcctgcaggtgatgggctcgtgcgccgccatcagctccatggacatggagcgcccgggcgacggcaaatgccagcccatcgagatcccgatgtgcaaggacatcggctacaacatgactcgtatgcccaacctgatgggccacgagaaccagcgcgaggcagccatccagttgcacgagttcgcgccgctggtggagtacggctgccacggccacctccgcttcttcctgtgctcgctgtacgcgccgatgtgcaccgagcaggtctctacccccatccccgcctgccgggtcatgtgcgagcaggcccggctcaagtgctccccgattatggagcagttcaacttcaagtggcccgactccctggactgccggaaactccccaacaagaacgaccccaactacctgtgcatggaggcgcccaacaacggctcggacgagcccacccggggctcgggcctgttcccgccgctgttccggccgcagcggccccacagcgcgcaggagcacccgctgaaggacgggggccccgggcgcggcggctgcgacaacccgggcaagttccaccacgtggagaagagcgcgtcgtgcgcgccgctctgcacgcccggcgtggacgtgtactggagccgcgaggacaagcgcttcgcagtggtctggctggccatctgggcggtgctgtgcttcttctccagcgccttcaccgtgctcaccttcctcatcgacccggcccgcttccgctaccccgagcgccccatcatcttcctctccatgtgctactgcgtctactccgtgggctacctcatccgcctcttcgccggcgccgagagcatcgcctgcgaccgggacagcggccagctctatgtcatccaggagggactggagagcaccggctgcacgctggtcttcctggtcctctactacttcggcatggccagctcgctgtggtgggtggtcctcacgctcacctggttcctggccgccggcaagaagtggggccacgaggccatcgaagccaacagcagctacttccacctggcagcctgggccatcccggcggtgaagaccatcctgatcctggtcatgcgcagggtggcgggggacgagctcaccggggtctgctacgtgggcagcatggacgtcaacgcgctcaccggcttcgtgctcattcccctggcctgctacctggtcatcggcacgtccttcatcctctcgggcttcgtggccctgttccacatccggagggtgatgaagacgggcggcgagaacacggacaagctggagaagctcatggtgcgtatcgggctcttctctgtgctgtacaccgtgccggccacctgtgtgatcgcctgctacttttacgaacgcctcaacatggattactggaagatcctggcggcgcagcacaagtgcaaaatgaacaaccagactaaaacgctggactgcctgatggccgcctccatccccgccgtggagatcttcatggtgaagatctttatgctgctggtggtggggatcaccagcgggatgtggatttggacctccaagactctgcagtcctggcagcaggtgtgcagccgtaggttaaagaagaagagccggagaaaaccggccagcgtgatcaccagcggtgggatttacaaaaaagcccagcatccccagaaaactcaccacgggaaatatgagatccctgcccagtcgcccacctgcgtgtga

SEQ ID NO: 271 - DNA, 20450 bp, Mus musculus
  misc_feature (11023)..(11084): "n" at positions 11023 through 11084 can be any base.
gggctctgctgtgaggatggaaggaaagatgaatatttggtgactcctttgagactctgcccccagtacgcttttctgcttctgatggtcttcatttccacacactaggacatgcacggtcactaccatagcccagttctcatactgaaagtgaggatgtgcactgtcggggcagtggcaagaagagtgccttcaaagtgagagtattctgacagtcccaggccactgagatggccacacaccatggatccttcctcacaagttcctatgtgtcctctgagctggcccaaccctaggaagaatttgcaacagcttgaacccatcacgttttgcacacaaaacctctgaccccttcatctggagttcattgattcaaatgggcgtgaattggggcgaatgggatcagcccacttcaaaggtgttgcagagtgacaggccactcccactgtgatatgcggcagttcggcagcagactccaacaccgagtctttcccttacatcacctgtgataacgatctagatccacacattttctctccttgctcactggatccttgtgataatgtgaattaggcagaacacatccatcctgtagccatggaaacctgagacatcacagtgatttagtagtaaggctaggacttgaacctaccactctcaattcataacaaggccctttaaattgtaatgtgtcatcaaaatactcctatctggggccctgggagttggaaagcagattcagggcagaaataagacaggatcccacacagcctggggcccccaattcttctgcaattgagcccctcatactcctgggtagcatgcaggcatcccccaacagcctccgtataaatcacaggaaggaggaataacgtttccccaggattgccctgagaaatgttttcttttcccaggggatgtattggacacaagataaagggctagggtagaaaacaaactttgcaaagccgtgctgggcatttgtgcttgctctccctgccctcgctctcccctccccccacccacgtgtgggaagacacaaggttcccttccatgatctcccttctccagggatgatcgtcctggcagcccaggtctcaccggcattctaaatgcacaaagccctaaatgttgctatgggtgacatcaggaaagacaagtcttgaggcaggtttcagagcccaacccagaaaccagagtgtgtgttttatcattccctatcactgtcttctgtgaccacacacctgacagaagtaaccggaggggaaaagttagtattcttactttttctgtgtatgagtgttttgtcagccgtatccatgagcatcaccggcatgcctggtgcccttggaggccagaagtagtagatgccctggaactagagttacaggtggttgtgggctgccgtgtgggtttctgggaaccaaacctggatcctctgcaagagcaacaagtgttcttagctgttggaccatctctccagtcctgggacaatttacttgatttaactcagtcttagaggttcctggatgctcagctctttgtatacgggagaaacatcatgttggtggggacatgtgacagaggaaggtcttcaccactcagtagacaaagaatagaaagagacagaaatgatcagagcaaagacacttccaagggcctgtccccttctccaggatttacttcccccaggtagtgtctcccatagtttccagaatcttccaaaatagtaccagcaggtggtgacctagacttagcacttgtgtcacagggccaaaccacataaggtagaaatctttaatcactgacccacttgccatcagggtcaaaggcagtaaacttggtcattccaagcttgttctagcctggcaagatgcaggtagtaccttgaagtctgatcaaagacaccattcattctgtccccacagcccctcaatgatgcctgcgagtgtcaagagagccacagttgggctctggaagagtccaccatttgtacctttggcagtcaacacacaaccatctcatgtcccctattgcaagaatgcccagagagtgcatctctgcttcccatgagaagccatctctgatctgcccagtacagtgaatgcccctctctcccttttgagcatactctgtcttcatcatttaatctctttgtttgtgggttcctgccctccatactaatcatttcaacccacatttgccactgccccctcaccacctccttgcaaccaatgtgaattcctcacgggtgcctagtgtgtgccttccctctgggtgtttggcacagtgaccagcacacattccatcaccctatgcttggggtatctacttgttgatccctaatgtcctaactcagtgaactgtcatacatcctcagtgcaccaagcatttggcaaatatacttttattgttagtaattgtcccaacaatacaaggaaggagtatcctttttattttatttcttatttgtttgaaacagagtcttactatgcatccccagcaagcctgggtctcactaggtagagcaggttgtcctggaacgctcagagctctacctgcctacctttgcctctcaagcaatggagttaaaagccatacacatctgtatgcatggggtatactttttaaaagacattctgctcactgtgtttgtgtgcacaggcataccacagcccatgcaaagaagtcagaggacttcttgcaggaaccagttctctcctttcactatagagtccaagagatcaaactcttagtcttgacagcaagccccttttcctgcaatgccatctttcaggtttacaagatgtaaccttatccctgctccagggcaaatgaataagttatgtgataaattaagcgtttgccagtgccacactgagcccaagtctggaagtcagtcgagtctaattattaaagtggggcacaacccagagcagtgaacctaccttctgccaacactcagtttgtagcaagaccgaaggctttcacgctcccaaccacttctcacctcacacctcctgcctagactgggccgtctttctgatgcatgcacctccatgggtcttcagactatgctgtcagaagagtactggtcactgagtatggaaagagtcatttcaggacaacaggatactgtcacctctgtcttcttgtccaccatctcttccgcctcctgggctgggaccattggtaaagagtgccatcctccagtaaatggaatgttcctgttattgcttgtagagtctcaaaatggtcatgccagagaactctccaaaccctctgagtgctgtatgcactgagcaatgcagaccagctgactgctgcttcctcccaatacccacagggctacaacaagagaagaaggcgtggcaacaatgctttgggggtagagtctactgagtgcccaggaggaactgcttgaggccccactgacctgcattttgcatccttctgtgccacaccctgtgaagcaaagtcttcccctaacccctggactgctgttttcctgaggcttgtgcaggaagcagtagaatttgattggagggaaattacggtggaaagagccaatctgagcccaaggtgagtaagtggctggtttcagatgtgtgagtacctcagtcttcagctctgtaataaaggcataaaggctcagcctttctatgctcacagttcatctggaacacgaatggcaggttagcactaatttccatgaacatcagtgtggagatctttccagaagtattcacagcacttctggtgacttctcccctgtttgtgttggcttgcccatcacggtgacaaaacaagggaggctaacaacttaaaagaagaaacactaacaacctggatgtggtggtacccacttgcaatcccagcttagggagcccaggcctgggccaagagcattgtgagtgtgaggacctgggctacaatatggagatcctgtctcagcatgaaacatgaaaagtgaggagatgcaggatatgtattttggctcttgcatttataaattctgtccatggatgatggctagttggttctgttgcttctgtgggaggttggaacatcttggtagggaccaagtagcagaccaccctcatggagagtgggggccgggcaccctttaagggttatacccccaaagagccaacttttcacccattggcctctccctgtaaagattccattactacctatcagtaacacagactagggactaaaccttcaacacagggacctctgggaacacccaagatccaaactacaataccatcttatagtaggatatgctcaggaaatgaattataaagtcactctccataaaacaggattctgaggaatctgtgaagacaacacacggttggatttccaccctgaaggaaatctaaaggtttgtttaccataaagatatgaaaatgaaataggtggtcagggagatgactcaggtaaaaagtgcttgcatggcctgagttcaaatccctacatacacacatacaaaacctgggtggtgtgggacacatctgtaatgaaatgctggggaagcagaggcaagaggatccctgaagctcactggctggccagcctagcccacttggttcactgagagatcctgtttgcttgcttgcttgcttgcttgcttgcttgcttgcttgcttgcttgcttgcttgcttgcttgtctgtctgtctgtctgtctgtctgtctgtttttaaggacagggagatgactcaatgattaggagaactggctgttttcccagaggacacaggttccatccccagcatccacatggcatctcaccatcatctgtaactccagtctcaaggaatccagcatcctcttctggcctctgtggacactgtgtgcatatggtgcacagacagacacacagacaaaacattggtgcacataaagtcaagacaaataagaggaaaagaggccgaggaagaacctggtgttgacctctggcctccacaggctcatgcatgcacacacgaaaaggaactgtgcttggatgaatggtcaggcataggaaataaggttcattccggagatcgtcttgcttcatctggatccccacgctcacacccatcaggatacaatacggttcccatgaggtatgaaaggctggaactgccatcctcattttggcaggcttgcaaactgagactcgagaacaataacaagctttgccaaaaccatatcccaaagtaggatggggttaagataaacactagtcagggcttcatcccggacttcaggccacatgtgtaagttactgtgagctcagaactttgacgtcccagctcctaataaaacccagaagcccctgctcacagggcataattagaacaggaagaagccactgaaaatagatcctgggagtttttagagaacagtgagcgacaagagaaactatatacaaattgtctaaatatgcactgaagaaaatatcatgtgggctatagttctttgctatgtgcaaacatcttaggataaataatcaagaattgactcatctacagatcatttttcctgctcaatcttatgactgcttatatggttaggtttcgcctttggaagcagtccaatcatcccttcatcgggtatcccaagggctctttctccatcattggctgaggtatcttctgaattctaaagccctctttcttaactcccctctgtgtgcttcctcggtactctgccagctccttcctaggggtgactatccacacgattacagcaatccccaggcaatgtaaggacccacagcttctgaaggtatctcactaagaggatgacatcatgttttacaaagataagtccattcataagtgtctggctcactgatatccttagcttgattcatccctcagggcttggggcaatgactttttacgtgacagaggactatccctcgcttgtcttttgatgcctagccagcctgagggaggctcagggtcactatcattatcgttagtagcaacatctgtattttgagacagggtctcatggggcccggactgaccttgaactcactacataatgaggatgatattgaacctgtttctctttcctcctcctccacaggctagggttacatgctctgcttattcagtgctgggggtggaaccccagggcttagtgtatgccaggtaagttctccaccaactgagctctatgcctagccagcttaaacacttttcaaaaaggcaccagcgctcctgtctacaggtctcacccacatttgatcctccttgaggcctgaacaacttcttgttgcaggggcaacctgtcctgaatccccagtattctctgaaaactctgtgctccttgatgtcatcactgtttccagtagttgccctttggggctggagagagagctccgtggatgagagagttggctacacaagtgtgaggacctgagttcaaatcccccagtgcccacatgaaaaaccatgggtggccatgtgtgctcttgtaaccccagtactgtggaaagtggagattagaggacatcaggagctcactggccactagcttcagactcagtgagagatcctgacacaagggaatcagatgctgagttgtagaacaagacacatgaactatacctctgctctccatgtgtgcacaggcacacacacatgtgcacatatactacacacacacacacacacacacacacacacacacacacacacacacacacacactgtccatttgtgcctcctgaaactagttctgcacagtagggtgagggaggacaaatcccaggccaaatgatggctcttctccttcatctctcattctttccttcttcaccccacccactcactaattcctgtagttgtccatacaggagatacttgggcagtagttagcgttggggtgggttgtgtgggcacaatgtaacagccacccctaaggaactgagagcagagtgggagaaatgatgaacacatgtgttgatggtggctgatttcgcacagttagattattctttagtccatctcctttcccctcccaagcatcctccagagggaactggaccactgatctctgacttacagagtcagaaaagctgaagcccacgttggttagctggcatttggatagtccagatcctccttacccagtgaagtattgtttctggaacatttctttactacccttcgcaaaaataccaactgtattcaggtgctagtaggaatgggtattgacacatgctatgatcggcttgggtacctggggacacgatgctgactgaaggcacacataggcccagagctgtggctgaaagtcctgtgagaagctcaaagtgaatgattccagtactggaagccatcgggatgtcccctttgtgcccgcccttcccgatgtgtcctccaaggaaaggagaagaaactagaataattggttgctgaagtcaaacatggtggtacacacctgtaatcccaacacgccagagttagagatggagggatgataactagcctggactatacagtgagtatgattctagcctgggctacatgagtcattgtctcaataccctctttctaatataggttcttgatactgtgagctatgaaagtgcttttctgtgtgtggtgtacatgtgtgcttgcatgtgtatgagcacatgcatacaaggccttaagtcgatgaccaggtgtctttcctggtcactctccactttactaactgaagaagggactctcacccaacctggagctctctctctgcacttagcacaactagcagcttgcctagggaatgccttgtctctccctcaccagtacagggcttacggggcaccacacctgcccagtttttatgtggtgactaaggatttgaactctggtcctcacacatgcctggtaaagactttacccactgagccatctctcctgcccctggaatgttttcaaggctctttaaagagctgagagtgcattgctcgcagacctcagacatctgttttggtcttgtgatgatttaagccccagcagcaagcagacccaaagcaagcctgtggtgggtgagagagccttcacactatgagccttgcccccgccgcaactgctgctgagccaggttccaagggggctctcccagaagtcctcagtgcacagggaacagtggacatctggaagcggttagtttcagtccagcctggaggccggaggatggactaaatgacccctgcaagtcaccctctgccatctgcctctccggtcaccttccctcatttccagcaggctggctttctctagggaaaaatgaatccagggctctagcttcccttgggagtcacaatgatttcattctccagcctgtggaatctaagttccatgagacaataactctgggagaaatggggaagaagccggaacgacacatactgtatatatttagactcgtctagcaacacgtgctcctcagagcaccacatgcatgggagacagggaccaggagtccttggcctgtcctccaccctgcccctgaccaccccaatgtccctacttggtgcccaagtgacctctttacctggatgctctgcaggaagctggtgacatcacaggacagagctatcctgattcttcctacgctgagatttttccttcaggctatggatgaaacccaaagtctcctacaagctaggcaagtcctttacccacaaacttcaccccccacctctgcatagacccaaccccagacatgtgggctgacaagaatgtttctgatgcctctgagtctgaggatcattatggcgatagcttctttgaacccctttttggacacctgttttactagttgcttttcatatgggatggcatgtcatcacaccaacccctaagaataggagcttcagacagatagaatccaaggttacccaggtcaggaaccaccactggagcctgtctgggatgacttcctggggtcctgttcaggacagccagtgcactaggctcatgggcttcagtctgcacccgttggaattgctgaccctaaacactgcggccatgcctcagcccttctttgaaaaagctgtttataataaaaggtttcaaacactcggaaaaagtagcaggaagcagaaatggacccatcttccaggttcaaccattgctgacatttgagatatgtgtccatccctactccccagccccttgcccaccacaggcctttaaataaattcctgacattgtgtgttattctgcccctaaatactcccatatgtagatctaaagggggccagggaggaaagaagagggaagaaaaaaataactatgaatccaaattcctaaggcaaatgacttctagttagctagttcaactctaatgtctcctggtgtcaaaaaataaaaacacgcgtctgcatttggttggtgcccataaaaagattcaaaaatccacacaccgcctttggtggtgcccctcctccataaatcttggcctctctctttcctactggtagttaacaagctgccttgagcagaagggatggctcagaggttaggagtgaacactgctggcagaggacctgggtttggttcttagccaagtggaatagctaaaaaccacctgtaattccagatctgggggctccaagtgagtgttacactcacacaacatactcttgcatgcttgtgtatacacacacacacacacacacacttaaaacctttaaaagaagttgtcccattaaacagtaatgtctcaaattctaggtctgtggaacaggctctgcaccggcagagtttacgacaatttgacacaagctaaagtcattttagaagggggaacctctactgagaaatgcccccactagttaggcctgtgatgcattttctcgactgattattgatgtgagagggcccagctcgctatgattggtgccatcctgggtagtgtaagaaagcaggctgaagtggagcgagcgagttgagcagttgtctggtcacgtctcaaaaacccgtagcccttgcagtatggctgaacaactgactgaagagcagattgcagagttcaaagtagctttctcactatttgacaaggatggggatgggacaataacaacaaaggagctggagacagtgatgaggtccctggggcagaaccccacagaagcagagctgcaggacatgatcaatgaagtagatgcggatggtaatggcacaattgatttccctgaatttctgacaatgatggcaagaaaaatgaaagacacagacagtgaagaagaaattagagaagcattccgtgtgtttgataaggatgacaatggctatattagtgcagcagagtttcgccatgtgatgacaaaccttggagagaagttaacagatgaagaggtcgatgagatgatcagggaagcagacattgacggggacggtcaggtgaactatgaagagtttgtacaaataataacagtgaagtcaagacactgtacagaatgtgttaaatttcttgtacaaaattgtttatttgccttttctttgtttgtaacttatctgtaaaaggttccctcccctactgtaaaaaaaagatgcatgtatagtaattaggacttcattcctccatgttttcttcccttatcttactgtcattgtccttaaaccttattttagaaaattgatcaagtaacatgttgcatgtggcttactctggatatatctaacttagatggagttggtccaatgagggaacatctgggttatgccttttttaaagtagcttttaggaactgtcagcatgttgttgttgaagtgtggagctgtaactcagtgtggactgtggacagtcaacaatatgtacttaaaagttgcactattgtaaaacgggtttttatccaggtacttggacactaattttttttgtactgctggtattgtaccaggaacattttcttttattgttacttgctctttaaactttgtttagccacttaaagaaaacctgcttgtggcacaacttgcctcaaatccattctaagttgtatatttgttttccannnnnnnnnnnnnnnnnnnnnnnnnnnnnnnnnnnnnnnnnnnnnnnnnnnnnnnnnnnnnnagggagggaaggaaggaaggaaggaaggaaggaaggaaggaaggaaggaaagaaagaaagaaagaaagaaagaaagaaagaaagaaagaaagaaagaaagaaagaaagaaagcaggctgagtaagccatgagagacaagtgtcactcttccatggcctctatatcagctcctgcctccaggatcctaccttgggctcctgccctgatttccattcatgaagagctgggatatataagtgcaagctgaagcaaacaaacaaccctttcctccctgaattgcttttggccattatattatcacagcaatagaaaaataactaattcaaattccttgagggtgagggtaggggagtgtgtggcttaggtggttgttgttgttgttgttgttgttgttgttgttgttttgtcatctagactcaagaagccagggcctgagaatttcaattaaaaaggcttccatcagattcatctggaagcctgtagagtgttttcataatgaatgattgatgtgaggggaccaagcccactgtgggtggagccattccctaagcaggtggtcccaggtggtataagaaagcaagccaggaagcagcattcctctgtggcctctgctttaggtcctgtctctaggttcctgtcttgagtccctgtgctggcttccccttagtgatgcactgtaagccaagtaattccctcccttctctggagttgcttttgatcatggtggtcatctcagcaaaagaaacctgatacagacaggtagttcgctcacatcctttcctcctgtgcttcctattgagatgcagtggaggcagaggaaggtggctctctgagttccaggccagcctgtgctacaatgtcaattccaggaaagttgagttcaggcaatgaagaaaccattgggaaaaaaaaaatttgaatgaggaggccattttccagccccagcaagcagaacttggcagcttctgccatgtggttctggctttagagtcaaggatacaaaaggggcggggcggcatacggaatctctcctcctgaggcaaggcccaggcatgtgtcaggggttcccctgcatggaggcctacagaggtcattgtttaaagtgaaggtgagggtgaagcctatgtcgccttgaagatcccaagatgttggagacgccagagcagtggaattcctaccaagggaagctgctaagagggagtggaactagcccaagagagggaagtgtgctgcagtcaacaaagccgaaaggagttggacatcagacatgagatgcagagttgggagtttacccagatgatttttagtcttgctttggccagcatttcctcaccatgtgcccttcctcccctttagtaaggaacggtgatgtatattctgcaacattgtatgttggaagcatgtgatctgctctttgattttgactttatagatgtttacagtaacgatatttgccatgagtctctgaacacgcttcgaggtttgcactttcaatcatgttgagattgtgaacgactacagggacttttaaatctggactgactacattgttccattgtgatatggctctaagtccatggggggccagggagtgggacgtggtggtttgaataaggatgtcccttaaaggcttatgtttaaatgtttagtcaccagggagtggcactatttggtctctaggaagcatggtcttgttatagaaagtatgtctctggaagtgggctttgaggtctcaaatgctcaaaccaggcctaatgtgtgtgtctctctcttcctggttcccactgctccaggtgtagaattctcagccacccctctgtcaccaggtctgcctgtgcattatcatgcttcccaccataactctattactgtatacaactagttatatactataaagcattgcacatcggtatgaagagttaaagtaaatatcagtgtggaccacctcctagttcataaaataaaaccttaacgactcaatttgtgagttttgtttagttttgattttgaaaaatccaagtctcacactcttgcgcaggtcggccttgaacttccattcatcctcctgcctcagcctcccaagtgctacgatttcaggcaagagatatcacaacccttctagtgatgctttaaagaaatggaataatgagatggtcttaaagtgcagtggggcagtgagcagaagagcaggggatggcacacccctgtgagccggtccatgggaagagagggcgtctcgggggaaatccaaaaatacattgagctgaaggaagatggaaataccatgcatttcaagttaagtgacagcctccaagttagaagagaaagctgagtgctacaggcttaccctggaaagaggaaaaggtgtgggtcccaagcgcacactccctgtggggaacagtggagagccagacagaatcagtagcagtggactatggaggaaaagagtctcagaagatcagtggagcactggcccgaggcatactgccctggtgggattgcccgagggaaaaggaattaaggcccaggtgaccaactcaggatacacagggatgttgctacaggactctaaggacaccagaatgacacaaaccaagaaacacaaatgaccacggtccactcagtgtgaagcagataaccagaacacactgtgatgaatagaattgaagtcagggactggggagtgggctcaacagtgaagaacacttgctgctctaatacaggacctggattcgattcccagcacccatgcagcaattcacaactgtctgtaactctagctgcaggggaacggcgccctcttctggctgccattggttcctacatgcatgtggtgtacacaaactcaggcaggcatgcacacaacacataaaaataaaatcttgctggcacacctttaattccagcattcaggcagaggcaggactttgattttgaggccagcctggtctacagagtaagctccagggctgccagggtgacacagagaaaccctgcctcaaaacaaacaaaacaaaaacaaacaaacaaacatctttttcaaaaagagaattaagtgaatatttttcattatcacatctatttatttacttaatgacttatgttctccccttccaccacgtgggcttaaaggcgaaactcagtttccaatcttggcagcgcgtgcctttaccaactgagcagaatcatggacactaaattcataattttaacaccttcaaaagacaaatctttaatcccaggaactgattttcctaaagaacaccaacaaatgtttagagaagaattaatcctagttgtactcaaatcagcaaaagataaaacacaggagcacacaaataccaatgatgttcacaaccacaaggaatctcagtaaaataccagcaagtacaactcagcaataggaagaactgcatgcactgacaactgaggaagcaaggctgttatggtgtaaaaaaaaaaaaaaaaaaaaaaaccctattcagaagggaagaagaagaaaaaaaaagaattccaagagcattttaatttgtttaaaagatttatttactttatgtgtgagtgctctgtctgcatgcatacctgtgtgccagaagtgagcttcagatcctattacagatggctgtgcgcaaacatgtggttgctgggaattgaacttaggacttttggaagagcagccactgctcttaaccactaagccatctctctaggcaccttaggtttgggttttttgttttgttttgtttgggggggttattttgggtttttgtttgttgttgggttttttttgtttgttttttgttttgttgttgttgttgttgttgttaaaacttcaacatctacctgttgctatcttaacaattcaaagtaagatttcccagtaaagaacgaatacacaatccatgcagttactgctgtctgtagaggtaaacgcagtttaactactttcccgtggagtttggaaccaggcaagaatgtctgctttctgcagcacttaattaatgaaatgccaaagaaacaaggcaggaaaatgaaataaaagagcacagaatgcacacactgacacacacacactcacactcacacacacacacacacacacacacacatgcaggcacacacatgaaataaattttttacaaagactcaatgtagaaactatgccagaacttcagagatggctcagtgggaaagatcacatgctgctcttgtcgaggaccagaattcaagtcccagtacccacattgtgtgtcacaccatccacatctccagatccaagggacccaacatcctcttctggccactgtaggtaccaagcacacatgtggagcactcatatatgaaagaaatcaatctagaaataatcttaagtaaataaataaagctaaaaagaaagtatgtcagtgttccctacattgctagacttaagcaacacagttattatcaaactcttgggaagattggtggtcgtgtacacaggctgctccaaagaggattatgttagctaaaataattttgaaaaaggaatatgtacgtggggggaaatctgcctacgtgattttaagatgtatagctgcggagtttggatgcagttcacttggtagagtacctgcttagcactcacaaaacagaggcaggaggatctccgtaagttcaaggctgcatctatgtagcaaggtctaggccagccaggtctatacatgtgagtcctgtcttaaaaaaacaaaacattttcagaaaaatgagtgcaggaaaagacatgagcagcagcattcattcggggtgtgtgaacagagccatacgctcttggtgcactgctggtgccaatgtgagattgtgctgtcactctggaagactggggacttctctggcaacttaaggatgcaatatccttatgggccagcagctcatcaaaggaatgaaaacagacattggcatatgaaccaacatatgaacatgtctaggagcattgtttaaaaaataataatgacagcttcaaacaactcagcaatcggagaacagttgtgaatgtagaaaggcagaagggacctcctggaggacacaggatgtcctatgtcttcaccatatcaatagtgaaggtcttctcagccacgcccctgcctcctgctccaagcattataagacatgagtgtctaggaatctctatagttcatctgatgtgaggcccaaggagtctgtatgataaaatcaattaagtatacacaatctctctctctcccttccccctctcacgtgggtagacatgcacacatgtgcacatgtgtatgaggagcatgtggaagccaaatgccccccttgagtgtcctcctcaccactctctgcctcactctttgagacagagagtttctggttgagacgactgtctaggaggctgaacaatgtactccagggttcctcttgtttgccagtctgctctggtctgtaacacacaacttactgagtctagctctggagtgagcactgggcatctgaattcttcctgcttgtgcagcactgagccatctgtcaagtaattattattctttagacgggtttcactgtgtaacccagactcacctcaaacttaccatcctcctgcctcaggctcctaaatattggaatcccacgcatacattacatctggcctcatcatgtcttataatgtgtgaggttctgcatttttcgcaaataatttaaccaagatttttattgaatatatctattttatttttaaattttttattatttatttttatgtgtgggtgttttgcctacatgcatgtctatgcattgtgtgcatgcagtgcctgtggaggccagaagagggcatcagattctcctgaaactggagttaccaagagttgtgagccaccatgtgggtgctgggactcaaagccaggttctcttgggagaactgatggtgctcttaactactgagccatctctccagcaccagtgtatcagttttcagtgaatatgtttgtgcatagtgctactcatattagggttagtgggggagtggcgttttgtggagactatgctgtgaaacttcgttcacataaccgggttcacccggggtttattacagaaacatgactgcgaactctctgaactctttccaacttccatgccaaaaataacatgcggccctgtcatcgggaattatttttaatagtttatcagcagacaattcctctgagtctcctcttatatagttgaaggcaaaggagtggagaacatcttatctgcaaagagctgccgcttgaccttatgctcatttcccttgtctgggaaaatctaccccaggtcctttatcaggcctcatggctatggctcctcttctcataagcacctcctacctggtggtttagagcaggtcagagacactgatctgttgttgcatttactgagccttaagtgctgactgcacatgtgttccactttgttaggagtggcaagctcggcacactcactttgcaaatacccacagcaggtgtgagccatcactgcttcatctcccagaggcagctccctgggtcccttccaaaacccttcagtctgctctatgaggtaataagtggacagacatcctgagctttaattcaaagatgatagaggatagatggatggatagactgaatgatgatagatacattgattaatagatactagatggttgattgaacaataatggataatatatggtagaacggtttattgattgttgatgtagatgacatatagagcagttggttgatgatagatcagatatacatgattcatgttagataagagatgattgatggattgttagatgatgcacagataaatgaaatatgcatgatagattgatagattataaattgattgagataggtagaatgattgatatattgatagaagatagaaaggtgataggtagatagatgattgatagatagatacgtagatagatatagatacatgcatacatagacaggtacatagatatagatagatacatagatgcataggtacatagatacatacataaatagatacatacatacatacatacatacatataaatatattcatacatacatagacagataggtacatagatatagatagatgcataagtacataaaagagatacaaacatgatagatgattgacggatgaataagtagatattgaatagatagatagatagatagatagatagatagatagacagacaggtagaaaggacaggtggtgagtagacagttgatggctggacagcagatagacagtgggcagagacagacagagaacagggtgtaaagcctgcttagtcattattttgatggaccaccctacctacagtaagacccctacatattcacagcccattttcctaggatcacagtgtattctctggcaatcactgggagaaagagagtcactaaccaagtggtatcaggttgtaaactcaaaattgctcccaaatggatcaaagtcttcttcctcgttcagccttgtggtgacagaagtcttggagtctcagcaggggaggcccgggctgcctctccttttctggcacctggaaactatgcacaccactgggtcagggaggggagggtgcatggctttgttctctggagcccaggaaagggcagcaggccctgagggcagcctgctgcttagaggcacgcatggcagtcggttagctaaggatccaggcatcagtgccagtgaagctcgtgcattgagaacctagcagccttcaagattgccctgtcccttccagattctgcgcaaccagagatggggttcctctgcccttcccaatggcttcctgccttcagatcaccaagttggtgtcacagccaatgggtctccctggcataatccattgtgtactggaggtgtcctaggagaaggctttgggggaggggaggaccccccagaaagggaaagagccacattgaagcctcagacacacacaaccatgtgaatcataggcctgtataactttttaggtctctgggaaggaaaggggcaaggcagattgaggggatgaggggaccgtggaacggcacagactgggagaacttcaacagttttgtttgtttcagagatggagagaaagatacaaccgagatttgatggaatgaggccaatgaatggatatcttctggaaaagtccacacttgtctccagatacacgagaatttcctgtatccttgcctctccacagcttagccctgaatagctaatttcagaacagagaaagaaagatctgtccttttcttggcaccttcagttcctgaaacagtggaagtcacatggattaatttatactaaagtattaatggcttaccacagttatactgaccaaaggtacattccaggtctaagggcctgtgaagtgtacacagaataatcaaaaacaaaggaatggcaaagaaagagggccaggagaaaggaatagatagggcttatcttcatctgttccctagacgtccaatcaggagcctcacacagcaacactcactcagggagtacactgataggctggaccagtctgccagtagatggcggcctacatagtaactgttctctcttttggatcacagtggtggagctggctagcatatacaaacacagaggggactacaggcactgcgtagacaagagaactcgggacgggggtcgggtggggtggggagggccctacctgctctgaaccagctcccatgtggactcatccttctgggtctaacgttcctacttagccagcccttttggggagggacagccaatggcagatgggacagaaaactgagatgagtcattatcactttagcaggaactaatctggcatattgattcaggatagaacagagcctgaaagagtagactgagatttgtgagcgctaagataaagatgagcaaagctttggcagctcttaggtatctgagggccaccgtcctctacaaagcaacgagaggcacggcggattaggatagactggttgcatccaaacactaccttgctgcctcaaaggcttattggacaccacagaaagacctctgctggaggcagaagtcacaggactcctcgtcacagacgatcacgggtcatggttgaaaaagtgaggggacagtgactaaaggactgaggaactgaggcaacttggcccgggtctagtggttgtcctatggtaacctagaggaaagtcatgttcaaaggacatcagccttaggaagggctcccagggttgctttgaggagtgcgggaccctaaggtggaaccagacatttcagagaaattgatgacgaggcagctgctctacttggcctcctgttgctgaaatatcactgactaaaaacgagttg

SEQ ID NO: 272 - DNA, 1163 bp, Mus musculus
  misc_feature (27)..(27): "n" at position 27 can be any base.
aattaatttaattacattttacctttntaccgagtccgagtggagcgagcgagtcgagcggttgtctggtcgcgtctcggaaacccgtagcccttgcagcatggctgaccaactgactgaagagcagattgcagagttcaaagaagctttctcactatttgataaggacggggatgggacaataacaacaaaggagctggggacagtgatgaggtccctggggcagaatcccacagaagcagaactgcaggacatgatacaatgaagtagatgcggatggtaatggcacaatttgattccctgaatttctgacaatgatggcaagaaaaatgaaagacacagacagtgaagaagagattagagaagcattccgtgtgtttgataaggatggcaatggctatattagtgcagcagagcttcgccatgtgatgacaaaccttggcgataagttaacagatgaagaggtcgatgagatgatcagggaagcagacattgacggggacggtcaggtaaactacgaagagtttgtacaaatgatgacagcgaagtgaagacattgtacagaatgtgttaaatttcttgtacaaaattgtttatttgccttttctttgtttgtaacttatctgtaaaagttccccccccctactgtcaaaaaatatgcatgtatagtaattaggacttcattcctccatgttttcttcccttatctaactgtcattgtccttaaaccttattttagaaaattgatgaagtaacatgttgcatgtggcttactctggctatatctaagcccgtctgcacatctaaacttagatggagttggtccaatgagggaacatctgggttatgccttttttaaagtagcttttaggaactgtcagcatgttgttgttgaagtgtggagctgtaactctgcgtggactgtggacagtcaacaatatgtacttaaaagttgcactattgcaaaacgggtgttttatccaggtactcggacactatttttttgtactgctggtattgtaccaggaacattttcttttattgttacttgctttttaaactttgtttagccacttaaagaaaacctgctcatggcacaacttgcctcaaatccattccaagttgtatatctgttttccaataaaaaaaattacaatttaccc

SEQ ID NO: 273 - DNA, 450 bp, Mus musculus
atggctgaccaactgactgaagagcagattgcagagttcaaagaagctttctcactatttgacaaggacggggatgggacaataacaacaaaggagctggggacagtgatgaggtccctggggcagaaccccacagaagcagaactgcaggacatgatcaatgaagtagatgcggatggtaatggcacaattgatttccctgaatttctgacaatgatggcaagaaaaatgaaagacacagacagtgaagaagagattagagaagcattccgtgtgtttgataaggatggcaatggctatattagtgcagcagagcttcgccatgtgatgacaaaccttggcgagaagttaacagatgaagaggttgatgagatgatcagggaagcagacattgacggggacggtcaggtaaactacgaagagtttgtacaaatgatgacagcgaagtga

SEQ ID NO: 274 - DNA, 30000 bp, Homo sapiens
tggctggattcctgacccagctccgttttttcccataatcttggaggaaggatagtttaactttctgaaccagggctctttatctgaaccacagaacaagaaattgatttcagtactattctctcaaggctggtacataactagtaccattctagatgcatagaagttgattcaatacataattcaatgccttaggatatttaggatttatttcttttatctgttgagaaacacataggccttaaaatcaagaatgctactgggggccagacacagtggtttatgcctctaatcccagaagtttgggaggctgaggagagaggacctcttgaagccaggagtttaagaccatcctgggaaacaaagcaagattctgtctctacaaaaaattttaaaaattagctgggcgcactttgggaggccgaggtgggcagatcacgaggtcaggagatcgagaccatcctggctaacatggtgaaaccctgtctctactaaaacatacaaaaaattagccgggtgtggtggtgggcacctgtagtcccagctactcgggaggctgaggcaggagaatagtgtgaacccaggaggcagagcttgcagtgagctaagattgtgccactgcactccagcctgggtgacagagcgagactctgtctcaaaaaaaaaaaaaaaaaaaaaaattagctgggcgcagcggtttgtgcctgcagttccagctacttaggaagctgaggcgggaggataacttgagcccaagagtgcggctatagcaagctatgattacgccactgtactccagcctgggtgacgatgagaccctgtcttaaaaaaaaaaaaagctactgtgattgtccctttgcccttcaccttggtcattagcacagatggctggaggagggaagctatgggaaggaagtgtcaaaggatagggcttgtgttatctctgacctgcaaattgaggaagaggtgtggagaggaagtacattctcactttcccaacatgggcaaaggcagagagctgtaaggttttaccagtcaggacaggaaaattcaaagacaaccaccttcttggccttggcatgttggtcatcaccaaccttctcagtggcaattgccaaagtcaggcagcactgtatgtcatgttgtggaagacaaatgctctataaataaattgacttgaaacagtctcaaatacacataaaccacaatggctttaaatgtaactcttgacttttttctcattttctttctcttctaagagaggtcagcaaggaaagttctgcaagagaggctttacggaaatccaacctaagaaacctgggaggacttttatgtatctgttttaacaaacatatttcacacctaaatatttgtttaaaagctcctggaggctttaaactccagagatggatacatacatctctgagcacgcacctgtatttcagacttaacgatgcacttgttatatgctagacatccatctttttaaaaattcattttctagaggaggtgattattcattttgtcattcaatttcccatcattaaaaatttcatgcagtaaaatcactgcatactaatggggtactgtgtaaagagagtatttttagtgactaagttgaaagaaaagatcattgatggctcttccatctgaggatttgaggagtaatcagagacaaatttctgaggaataccttggaaagacctggaagctaccagaatgcagagtaatgaaacggaggccttagggctccgttttcagctcagattctgaagcagaggtgtccgcttttaagtaacattctgtctcgatggtattccattcacaggataaagttaattaaatctcctttccccccaccatcattacgtcaccacattagcgaggacaatagaagcacagggtcctgagtttgcactgactggtcattcatctgaaaagaaggtcacagggttgccaatgctaattggaagagcatttaatgcctggtttgcatgactgaaagaaagaggacccacctctggcctggcaaagaaaagatttttgatggtgtgagaaaatgtctaacttggctaaaggaggttaaattccactgaagccttccaagtggatgcaggtagctgttagcatcagaaatggtcttgctgggcagggcaatgttctctagggagctgtcttcagtaggcaagatttcaccttggcttgcaaaaaatgctgttcactgggttttaagggtctacatgcttgtgctttttactggaaaattctcagaccttgatatggcctgtgatgatttctttttttttttttttctgagctggattctaccaacaatcttcttaaggaactgccttttgagatttaaaccttattcctctttaatttcccagcgtcctctctgcctaacgaggctggctgtctactttgggctttagtaatgcctatccccttgcaactcctccatcataccacgcaattacacacctccgggcctttgctgttacttacttcacccagaacttgctcccttctttcctccctgctttttcctagcccattttataacattagacaatttaggagttaccttctctaggaaccctttttggaacctcttatagaggactaaggtcctcacctctgcatctcgtaagcccttctatagttacaattataatcaaaccgagtttacacagtaggtgttcactatccacctgttaaatatttcaggtatgtacgcctttgtttattttggatgggaccaagcagttagtttttatgtggtttttaaaatattcatttaaatctgtggagttagaaatccaaaagggcaaatttcctatgaaggggaaggcatattatagtgaccaattgttggagtcctaccctgtgccaggtactttaacactttgttaattctaatctttgcataattctaatttcctcaatattctttcgagataggtcttattgcctgtattttacaagtgaggctaaaaattaaatgactcacccaaggtcttgcacctgagagagggacccaactaactcatgcccagctctgtccaatccagaaccctttaaccccacgataacaaggggccatttcgagatactaatcccactgaagctcggatactgtgacttttgagttacttttcttttctggtaaattacccttggcaaagaacgcgaagaggaagtataaacgaaataccctttgagattagcctgtcagctgaacagctacatttgcccgtgtccagatttacatgggttttgtgagggcgtgaaatgaagaacgtgcggcttccatgaggccaaaacactaggttaaaaagctgagttcagggtacgcgtttatcggaatctttcagcttcattctttatcggcttaaggtgttttcgtctacccctcaataaggggcgggaaagtgggtgagtgtggcagggaaggatacgtggaagaggaaggttctccagccaagcgcaaagcaggcgactctgccgcctggcgcagttgccaggacagcgcggcccgagcagcaacggcagaagccgcaccgcgtcccggcggcggctgcgagtcccagtgacgcattgcaggtacaaaccagccaatcagaggcaggctcaacgaccaacgggggacgcatcgccgccacgatgctcctccgcgccgcaaagtagcgcccctcaggggccgctccaccggccttttaacggctcgctggaaatgaaacccacttacgtcatccgttcgcccactttccttgatctcttgcctcatcgaccaaataactgtgaagaaaggggtcccgagaagagtttgaggggagggggttggccgggactcgtttgcgatgttccgttatctggatgcggcggagggatctggcggagggaggtgtttatgaggcgctgggggcggaggaggcgaattagtccgagtggagagagcgagctgagtggttgtgtggtcgcgtctcggaaaccggtagcgcttgcagcatggtgagtgcatcgctgagctgccggcgctgggcctgtggggggaagagactggagcgaactgactaaacaaaggaaactcgcctcccttacaccttcaaggagtggtttctgccagagggatggcgcgaaagaggccagggatgccggcgacggttgtgtcgcaggtgctcccccacccccattctcttcaggggggcttcctctagtgagttgagggccggacgcacagttcccgaggtggtgaagctcctcgggggcttggctggaggaggatgggtccgggatgagggacagcccagtgcacgggaaggagagaaagtgaaggaagggagagagggagcgtagagagccttctgtcgggcgtctggaaaggtcaagcagggggcgaattcaatccacccgaccgacggttagtgcgggcgccaggaagcgcctttgtccgcttgcggccgccatgcgcccagggggcgggaggagcgcgcggggccctggggcgagcgtcggcgtcgcagttagcccgcgtcctccgcgtgccgggatccagggggcgcgcgggcgggcgggcggcgcgctgtgtgggccgagcccgcgcggcgcagggagcggccggtgggggcggggcgggcgagcgcctcgcgggacccggagccgccgccccgctcggccccgctcgagctccagctgctctgctggcacctgcaggactgcggagatctccttggcgctgcggggccattggcggggatgggcgggggaggggggcctcgacggtttcccatccccctctggcaaccctaatcttccttctccatctgggccctggggcgtcttccaccacccaggccggatgctttaaaaaaaattgctttttaaagtgtctgtcgttgaaagaaattagtcttacccttgaagtcaggggcgcgtcctcgcaatacacatcttgttagggaaagtgttcggctccagctagggttctacaaggcgtttcttgttcaccgccggagggaagcaggctccggagtgactgccttctgaaagtcggtcttgtaacaattggatggatgcctttgaagagcccctgtccctattctatgcttgaaaacagcgtgcagtcctaatgttcaagaaccacgaccacataaaaacattgctccccttctgctgctttgaaaacgacccctaaattccgtgtagaagttgccaggtcgtcttgacgtacacttcgtttgtatgatgtttgtctgtcaaatactgtgatggaagagtgtatgcgggggaggagcagggaatttttaaaagcattttccggtcacctcagactgggagatcatgttctttcctgaaaaaaaaaaaaaaaaaaaaaaacacctaatgagggcggtgatctgtgatacttactttgtggttcctcctgccaagtggttacagcgatgggtgtgtccaggaggcaaggtgacatcttaaacaggagttagggatccttgccaactgaaacctccagcctgtatgggtgtggggagaggatttcaccttaaataaaactagcgttcattgacgtttgatggatttgcttcatcttgatgcttcaaatgttattctgaatttgaatgtgctggttacatttgctttcttaaagatgtagttacaggcatatgtaataaacattacaagttgtggagtaagcttttttttttaaataaacgaagggtaaagttttctttaatcagttttgataattgaatcagtaattcgaatagattttttcttggtagagttggtatctacgcatttgtggtcccttgcccagtgttaagcttttgtagttactgtttgcatcactggtgctttgggggttttctgttaaattgacagctcttactataagagacaaagtcgaaaaaaaaaatcttaataaaaattgacagatatcattatttgtgacagatacagtaaatttgaaaattgccttcacataactttataattagaggactgagattttacattaggaatccaattaaaaaaaattagccggacataatggcctgtgcgtgtagtcctggctagtcaatgggctgaggcaggaggatcatcttgggcccgggagttggagactgtagtgagctatgatcacaccactgcactccctgggcaacagagtgagaccctgtctctcaaaaaataaaaaaaattaggaccccaagttaaagtataaaaaattttatacggaagtaaagtaagattgctcatgtaactcttgagtttacatgtaatcaacatatgctcattgaaaacgggattgcttcaagaggactttgagtccagggtgattaggtaagtaaaagatgtaaaaaggtagaaaatttttgtcacttgagtctaaataattgttcttataagtgccaacgcctgtttctgttaggctcagaagatcaaaggatttggctcttttaaaatatagaaagctctagcttcagctagaatttaggcctttagtaatagccctaatttttatgaagccattttgttccagtgatcttttggtgagagatgctatgtaagtactattcttcagaattaggtgtctttttaccctaatgaaataatttagattgcttttgatacaggtaaaacaaatatcctggcttccataattgtagaaaaaacttcatataggaatccttgttgtatcaaagtagcacctgatgggaatgaacagacaggaatggatgaaggatagcagtttgcgttccatttcaagcctatgggctcacacatttattcagataagaacaccacctttcactagataaactccaacagtattcatgcatacttttgaatggcatgtaggaaatgtttgataggtacataatgtattcacttcaggtcactaatgtaatacggggtcgtgctccttagtgttgacagatcacctatggttctccaaaatgaacattctagtacaggaggtctagggaggaacctgagagtatactaatgcctaggaactttctctggagtggcaagagcagtgggaagaattatgtcaatagctacagaaataagggagtaagaacaagtcatctctctagtgaattcttcttcactttactgagataaacatacatgttaatgagcttgagttttcccaaaagtataattcttctggttcttctaagaaaatggcactccctggaaacaaggaagaaccaaatttattcgcctttgtagcagttgggaaagttagtgctaggaagtcttcttgatttatagtaggctttaatctggatattgctggtaaaagtttattctaaaacctgaactctggataagtaatacaaaaagcttctcaaccttccaagcaaaattgagagctttcaggttatgtgagtaatttggtctcttgggtgcttaattcattccttgaagctcatttttgtgatctcttccaagattgcatttgcttggaggtagggagttagacaagatggtatgaggtccctaaattttgactttccaagcaaaattggacagtggttcctaaattgctaacatcctcgtttcttcctaaggcttctcatgtttcatatatagtagccttcccaaaatcccatttcccaccccccccccccaacccatgtagagagaacgaacctgtctcccttcctgtacagagtacgggatccttcaactttcacacaggctgcagtgtctgccacacatttagctcaacttttttttagccttaaagtgatgtccgctgcatctgtcgctgggttgcaccttgtggatttagtttgcataaattttctcagcttaaacaaagttaacattgaatagagtaagcttaccataaagggcttaataaatgccatgcatgtctacattcggtgtggaaattgagctagtcaggttgatatttaacattgtaggttctttgttaatttatatgaaataatggttatcatttaactctttaggttagctttgtacatagcatctcactttgcacaacaaccctgcaaggtaagtattgttattcttgtgctacaaatgaagttgactgagaggaggagtaccacgtccaaggtcacacagctattaaatggcagggctgggatactggcctgtgactcagaacttgatgctttccccccacgccacgcatgccaggttgcccttcctttcagaaatggtggaagtcctgcaaaatgcaataaactgaagtaatgtagcttctattaatacaaagtaaataactcagatttactggattttaaaccttattccttgggtaaacaatctgactgacttcacaccaaatatttgttggcggaggatttggactttagggataaaagtggatacattttttattttacaaactctgtatttgaacttaattattggctcttcaattttacgttaccagcttttttttttttttttttaatgaatttgatttacatcatggtcaaacaaaaattgttgagcagggaaaataaactactttctggattccttcttgaattttctcatgtgccctagagaaaatgtgttccacattaaggtgttactttttccaggggtgtgttcatttaaaaagaatgaagccaggcaatgtttatttttcttttacctataaataaatgaatggattaatcattgtatacttgactcccatgttggtagggattttagataggaggctatttcttgtctgtgcttctcaataccccataagcagttgcttcatggatgtatatactaataagcagtgaaagaaagtgcatgttcaaagaatacaacaaggagtctggatattttgcaatcatctttatatattacggtgctctgaattaaaagctaaaagttactgggtatgtctgacaccttagtgctttatctttgttctactaattttctgtgccccaatcccacttaaccctagcctcattccttatctgtaagataggggataataccactgtaaggttattattaagattgaataaggataaaatttataatgggttttagcaaatggcagaaaatattttctgaagaaaaccaagtgctattaaaaaaacatcacaagccttgggcttactttgggattttaaaaaccaagagaaaatggatggctgaactttcaaacatttggtaaatattatagtattgtagttcagagctctggattctttgcattttgcctgctgggtgagaaggaataaaagtttgtgcctttttttttttttaatcactttaatttcaaaacaatgtgtttaaccatttgtgggagtaattttcattttgtgagcctgaagcattttgattcagtgggaatttctggtgatttatatctggaatagaagtgagcttaagtttagctattctaacgttgaaaaaggaagcaatgtttctattggattctaaagtatattttcaaaaatattctgaagtatttgtatatcttaaacttggagttaagacagcttagctttgaagataagagaaactagatgtgtgcattttctatccagatgtgtttgttgctggaactaaatgaaacagtacatggtaacccttgaaaggttttaaacttgtttctgtaactgctaatctacatactctcaagtcactaaccttcctctttgatctctttgtaggctgaccaactgactgaagagcagattgcaggtgagaaatactcagctagattgtacccattagattcttattataaattgaatagccaacgtcagaataagagacttgtatgaaataattgactttggtatatgtcatggatactaacatatgggtataatataatacagtaattcaacctgctttggcaagtgggattgtaaacttgccgatggaagatgtgcagggctaattgtagttaaagacatgtattttagtctgcgtggatatactttggagccttgtggtgtagtggtggtctttgttttgttttctgaagactaccttagtataaaacaggaattctgggctagctaacacgctagaaaaggaggccaagaagtaactaaggcaacttgaaatggagaatcaaaaaaggaacaattgaatttaccctagttaaaattagctaacattttaacctaagaattgcatatataatcagtcagggaataaccatttctcaagtgaaaaaatttaagaagttggcattctattctataaatgtcactgtagcaatgtggatttttctcttaaaaaacagtgacagctgttgaaatgaagccgcttaaatcttgtcccttttagtttgctatggaagtatgcaaaattattacataaaacctgatgtcatgttctctttatgccatgccatagaacattaatacttttgatttatccttgtacattgagatggctggttaatgtcaatgttggggaaacttttttttccccccttgccggagttgtttttttttttttattgtagtgttgaaatgctttgcaaactattcctttgttttcattagacacttttattagcatgagcaccaagcagtttatttgccacagttttcacagtaagcaggaagggtttgataagagctcaaaagcacttgagcactttttcttaggctggagaaaactgagaagcccagttggaactatatagcccatttaaagcaagctccccacttccataagcatatagaagtttgggggataccagaattacactagtcacctcaaatactatttgataggactgtaggtagaaagctattagtattaaagacaaatttaagcaggttttatttttatttattgtgtaatttgacttaaacttagtttttactttctgaggttggtaaattacatgtattgactgttatgaacaaaaagcaaacagttttgggaataattttttttttgttgagttacactgttttaaaggtatcacctatttgatctcatgtctcctcaaaaaaaatagactgggcctgatggctggtaatcttatcactttgggaggctgaggcagcaggatcacttgagcccaggagtttgagaccagcctgggcaacatagtgagaccccatctctacaaagtaaatgtatcgtcaaaatgtttttctgaagtagttttttttataaatatactgtctccttcccaaattgtctcaggctgtctaatactttcactcttaaactctgaccttctgtaatacatttcttaatattcccagtcaggtacaggtaccaactgtatgcagtacagcatgttcactttagggtagaaaacgttactcaatgtgccattgcatagttgatggtctgctctcttaaacaactctttgaaaagaaagtttgttggccgggcgcagtggctcacgcctgtaattccagcactttgggaggccgaggcggatcacttgaggtcaggagttcatgaccagcctggccaacgtggtgaaaccccatctctcctaaaaatacaaaaattagccaggcatggtggcgtgcacctgtaatcccagccactcaggaggctgatgcaggagaatcacttgaacctgggaggcagaggttgcagtgaggcaagatcatgccactgcactccagcctgggcaacagagcgagactttgtctcaaaaaaaaaaagtttgtgtctattgaatataagaggatccctcttcagtgattgatagcatttttattttttaatttattttgagacagtttcactcttgttgcccaggctggagtgcagtggctcaacttctgtctcccgggttcaagctgttctgcttcagtctcccgagtagctgggattagaggcatgcaccacctggctatttttgtatttttagtagagatggggtttctccatgttggtcaggctggtctcaaactcgcaacctcaggtgatccacccgcctcagcctcctaaagtgctgggattacaggtgtgaatcaccatgcctggcctggtagaattcttataaagaatacttgtagttcatcaaaactgtgacattcaggacctgttctctttattgtctttaagttaaatcctatcttttcttggctttcatcataaaattaggtttccaatgggagtagagggaaaaaaatctgttcttaggttctcttcttatcctgccttttcctagaccacagatttctttaaagccattccttggacctccaggtttcagttaagatttagggcagaggaaccaaaacttctatgctactaaaataaaaatcatgtgcggtcagggacctttttgttctactttgtaggcccggtacctgccacatagtaatcattgaatattccttgaataaattttattctcaatgagtgtgtaacacaaaaaagttctagagcactactatcctaagatttctgcctactctccaagtcccttcctcccaaatttggtatatttcagtgtttacctttgagatgaaggcaattttttaatctggtaaattgtaattgttggtggctgggcatggtggcgcatgtctaatcccaacactttgggaggctgaggcagtgggattgcttgagcccaggagttcaagaccagtctgggcaacacagcaagaccctgtctcaaagaaaagaaaaaaaaatttttttttttttttttttagttgtaagtgctggtgaccgctaacatccttgtggagaggaagtagccaaatttttttttttttttttttttttttttttttttttgagacggagcttcactctcttgcccaggctggagtgcagtagcatgatcttggctcactgcaacctttgctgtccaacttcaagcaattctcctggctcagtctcccaagtagctgggattacaggcgtgcaccaccacacccggctagtttttgtatttttaggagagatggggtttcaccatgttggccaggctggtcttgaactgctgacgtcaggtgatccgcttaccttgacctcccaaagtgttgggattacaggcatgagccactgctcccggcctaaaattttttatattacttggtcgtataaagcattccagtctagtatgacatcactaacaatttcattttgttgataactctgccatgatgtcattagttgttgctgtttgacttttggaagactgataggaaaaatgtacagtattttttccttaagaagtctgtacctaaactttcattaaattttcaaggtccaaatttgtttgagaaaaatattaatattactcaatgtatagcaacaactgcatgaagcgccaaaagagttccagtacatgatctttaagggattattaagttcagaattttgtgaagaaatagaagttaataaacagtcatttgatttgttttgtaattgtcttgtgataacctattttaataaaatttttaaaacatgttattttaataaaattatatgtttaggtaataaactaattagggaagggccttggggttgctaatgaacaaataaaacttgagtaatagatttttctgaaagtttcagtttggtcagctaaaatggattttggtaggttccttatatctatcaattatgtagaagatagctgttctgtggcattcaggacctgttctctttattgtgtgtttaggttttgactcttggatttaatttcaggtcattcctgggagttacagtttagaattatatgcttctatacataaagattacgctagttctgaagtacaggaaaactgtaaaggcaggtgaattaaaattttactttggggtttattattttgagtttttacaggtattttttactctttagtataaaaatacaagtaaaaatttggaataaaccttgacctttaaaagaaatgttatttgttcctttcttgaatgaataacaaatggtattagcatagatacggttttattttctgcattttacttattctagcaaacattttaagtgttattagatttttaaatttctcgaaagttatacatagtcttacactatgcatcttccagtatttagctttttgttaaatcatgtaatagaaaggtgattactgctaattaaacattgggaatttatgcacctaatggtggtgttaaaagatacccatagcagagaatgtaatataaacaaatacctcaaagtcctttaattttcttgtaacctaaattaggtgaaaggtgcaatgtgtctgaactccaatatatgtatttctagatatttctacattctgtttaaaaacagtaaaattgaaatgtctttatcaattgtgctatttgtaggtggagactccctgatctatttttgtcattaggttgatctaggttagcactgtatactatcttcataaaatcaattagtgtggtatgaaccttctgattggtattagatgagttcctctataaaccagtaatatttaaataagaaagaatgcagttaggaggcaattgtaatagccctggcaaaggacgatggagccttgaaccaaaatactggttgtagagatggaggaaaaatcaggcagtatttaaatgatagaattcgagacctgttgacagatttcagactgaaagagttaaaagtggctcttgggcttttgctagtacctttagggttgcctgggagtatagaattcattttcatatgttttgcttgtcatcagccaggggagctatatcctgtagacagccagaaataaagacatttattgagcgagatgggtagactaaagatatcttcgttgtaagtgggtatagatgaagtggccaaggagtggaaaaaaaggataaaattggtcacatctagacataagagacaggagtaagagcctttggcagtatatggtaggaggaaaatcaaagtactgttacgaaggccaagaaaaattttgagagtttttccatgcagttttggatgctgcaaaaaaatgagatagtctttatcttgacatttattaagtatgtatttgttggacatagttctaagtgtttgacacatactaatttttttatggggggtgaccaggtgaataccccttgtgggcatggtatactgtgtcaccccacttactgggcacatttatgtcatttcacagaaatgaggaagctgaggcagaaaaggtttagtagcttgtccatattgcattgccagaagaagaaacagagctaggaaattctaacccagtagtcaagttacaaagtctcattttagtttctatgccatatggcttcacattgaagcatgcttgatggattgggtgactgactagtagtcattggtaaactcagcattttcaggtgatgagttggagctggatgtcattttaaaatagtggattgtttggagagaggaaattggtatgagtagtagtgccttccaaaatttggggagggataagggcaagcatttaaaatataactaaggtttcaatttagttttaggctaagcgatgtgaagatatttatgtggtaatgggcaaattagtggaagaatagttgagtccagggaagaggtaatatggaatgaaactggaaggtgtacgcgaattggagttagggataagcaggcagggaataaattggccttggaccgtaaagaaggtacaccatttcttacacatgtgtcacataaattttcaaatgtatggctatgttgggaaagcttaatggcccaatgaacttggaaactttttgtattcatttgctgatagggtctaatattttctgggaaatgacttacttggaaaatactagctttattatttactgattggtataactttgcagtatcaaagttagtctgttttagtttctttctttctttttttttttttgagacaagtctcactctgttgcccaagctggagtgcagtggtgtgatctcggctcactgcaacctccgcctctcgggttcaagcagttctgctgctgcagcctccccagtagctgggactacaggcgcacgccgccacacccagcttgtgtgtgtgtttgtgttttaatagagatgggggactacaggcccacgctgccacacccagcgtgtgtgtgtgtgtgtgttttagtagagacgggggactacaggcacacgccgccacacccagcttgtgtgtgtgtgtgttttagtagagacggggtcttttctttttcttttttttttttttttttgagacggagtctcgctctgtcgcccaggctggagtgcagtggcgcaatatcagctcactgcaagctctgcctcccaggttcacgccattctcctgcctcagcctcccgagtagctgggactataggcgcccgccaccacgcccggctaatttttttgtatttttagtagagatggggtttcaccgtgttagccaggatggtctcgatctcctgacctcatgatccacccgcctcagcctcccaaagtgctgggattacaggcttgagccaccgcgcccggcctgagacggggtttcaccctgttgttcaggctggtctggaactcaccctgagctcaggcagtctgcccaccttggcctcccaaagtgctaggattacaggtgtgagccactgcacctggcttgttttagtttatctgtaaatggtgaatgaagccaggtagtctggagtgttgcaccagcaggaggtttccatgtaatctagtgatgtattagaaggaacatatagccgggcacagtggctcatgccctgtaatcccagcactttgggaggcagagacaggcggatcacctgaggttgggagttcgaggccagcctgaccaacgtggagaaaccccatctctactaaaaatagaaaattagctgggcgtggtggtgcatgcctgtaattccagctactcgggaggctgaggcaggagaattgcttgatcctgggaggaggaggttgcggtgggctgagattgcaccattgcactccagcctggacaacaagagcgaaagtccatctcaaaaaaaaaaacaacagcaggaaggaacatactatcacaacaagatgttgaggaataatcagtttcactatataaggttggggttttaatattccaaagaaagctcaaaatgatctttgttctcagtgacatgcatttagctaaaactggacatttatatcttgatcagcccattgttatagactctttatatagtcccttctcctgccttactagaaagggaaagtagcctgttttaatttagtaggtgattgatttagacatagtggctaactctaaacacagtatacagaaacagtttaattactctgtagaaatacgtatttgggtaccagtagtcttatttttgttttgtgagtgtaggttaggtctgtaattttgaattatgttccacagagcagcttcagtgacagaggagccagtcatttggggatttggttcttttcctctgtaaacctaggataattttacttaggtcagcatgaaagtacagtggtatgattggtcaaagatatatttgaaatattatcataaggtatcataaagattggttaatctttaggagtcaaagtcacatttcaattgctacctccattggtatttttccgttaaaagtttttgggtttttctgagacgtggggtcttacagtttggccaggctgaagtgcagtggctgttcactggcacgatcccaccactgagtaggctttaagagttaatacgtttcatttaggttacattttattattaatctgtgtatttggattgtggtctttctttcaaacagaattcaaagaagctttttcactatttgacaaagatggtgatggaactataacaacaaaggaattgggaactgtaatgagatctcttgggcagaatcccacagaagcagagttacaggacatgattaatgaagtagatgctgatggtaagtcttcaattttgtggggctgggaggggttgaagaagtgatacttagatgtttccactaaacctttgctgtttgcttatatgtttccactaaagctttgatgtttccactaaaccatttcaggtaatggcacaattgacttccctgaatttctgacaatgatggcaagaaaaatgaaagacacagacagtgaagaagaaattagagaagcattccgtgtgtttgataaggtacgtcaaggactggatatgttaaattttgaggatgaaatgaagataccaggactcattatgaagacttgtgtttttttggttttttttttttttttttttttttttttttttttgatgatttaccaacatattttaattaccaagcaaaagctttttaagaattcagtatagactttctaatatatgtattgcgttcatcttgtcaaaggaggtgtcacttgactttgggactaggaaataatgatttcaatgtaggacattttgcttggctcttaatgacatttgtaggtcaactgtgtagatttgtatgcatttctaaagtatgtttttcccccaatgtgaaatttagtagtaaacttaataaatttccattccaactctcaagtctgtaatttgactcagaaactatactaaattttttgctaggatggcaatggctatattagtgctgcagaacttcgccatgtgatgacaaaccttggagagaagttaacagatgaagaagttgatgaaatgatcagggaagcagatattgatggtgatggtcaagtaaactatgaaggtaaatgtttcagtctcacgcctcattcttcactttgatttttaagataagaggctctttgttagggaactgatcgaaattagtgacccttccccccaaattaggttgctaaaacagttacttacatttaaccttcttaaaattcagagtgttgtctgcagactaggtaacattgctctgacttgagaacttaatttagaaatatttactatcaggttctatccctacacctggaatcagcattttaataggattcttgggtgattcatgtataaagtttgagaagcactgttcagtgtttgtgtgattgtggaacaatgtggaaagcaaacttattccaagtttcctaaaatgaaattaatgtgactttctttccccgcactgtattgtcttttttctttaattggctttagtctgaaactgaagtttacatgtgcttcaaaagtatcgtatctactaacttttaagatggccatatcaggaagcaaggcatatgaaactgaaggattttgagtaaaactctgtatttttttcatgatgtaactacttaacttagaaaagagcataaaatgtaatgttataaaaattaaacctagcccatagcattgaatttacaatattgtcttgtaatccagcagacttaaaattcaagtctaaactaagagccaagaatgctcttttttatattggcctatctaaagcgttaatttggctcttactaataaacctgaatagttatggttaatgaagttccagcctgggcaataaactagcttccctctgtacttaatggtaattctgaggaaagagaggaatggaaagagtactcagtaattgagtaaatgtgatttttttttttttttttttttggtcttttgctattgactcattttttgtgtacttcttctttttcagagtttgtacaaatgatgacagcaaagtgaagaccttgtacagaatgtgttaaatttcttgtacaaaattgtttatttgccttttctttgtttgtaacttatctgtaaaaggtttctccctactgtcaaaaaaatatgcatgtatagtaattaggacttcattcctccatgttttcttcccttatcttactgtcattgtcctaaaaccttattttagaaaattgatcaagtaacatgttgcatgtggcttactctggatatatctaagcccttctgcacatctaaacttagatggagttggtcaaatgagggaacatctgggttatgccttttttaaagtagttttctttaggaactgtcagcatgttgttgttgaagtgtggagttgtaactctgcgtggactatggacagtcaacaatatgtacttaaaagttgcactattgcaaaacgggtgtattatccaggtactcgtacactatttttttgtactgctggtcctgtaccagaaacattttcttttattgttacttgctttttaaactttgtttagccacttaaaatctgcttatggcacaatttgcctcaaaatccattccaagttgtatatttgttttccaataaaaaaattacaatttacccaatggttgctctgcatctgagtcatttaactgttgaagtctaataattttgaaaataaaatatggcattggtttctgcttggtatagtctagataattttttctcgtgtggggaagcatatggagatgggtggcagaaatagtgaaggtgggaaaggaaggagaaaaggattggaaaagtgagaaaagagggagagaagcacagaaaataagaggaacaaaataaggggtgtaactaaggagagattgaagaggaaggccgaaaagatggggatctatgggggctggcttagtgtagtcaccttttgggggccaccatcatgcgtgcccacaacattcctccaccaccatgtgtgtcgtactgtgctactgtgttagatccaggatacctgtgagttgcctctgcccacagaacaagatggtggcagtcatgggaaaagaggggcaagttttttgttttgtttctttatccagattgtatttgacaacttcaaaaggccccaatgaaagactcaaaaacttaagtgtacctagtatgggaattggcataaagtaggtatttactgtttcctacctttatagttttcaactttggcatttgtccatgttgacttaagctgtgcagtgatgttttaaatgtttgcatgttcaaaaaaaaaccaaatctagttggggtgagcatccttatagttttacttctattaactaatattttattcattgtgctttttaattctataagatgagaattttcagcttgcccatctgcaacattttgcaaaaaaagatgtctttaggagtaaattggcaatgactacaccttgttttagtttttgctggcttctatcattgctttctctataatttgagctactccaaaggtggttatcagggtttttatttttttaaagtaccttttaaatgcttaatgaaagattccatagcaaaccagagccaagattaaaacattgagtgtaattgttacctggttattatagctacaaggtctttaatttcccaggggtaattcattatttggcaggttactgccccattgactatcttaatactactattagtatgttttagagcaagggaagttacaggcattgatagttctaatggtatcacatactcgggtaatcagttaaataggaagattttagatgtgcactctactccccttaattggatgtagtaaattttgtcgaaaggaaatccaaacaaggtttgttttttgtaaagacagggactcatgttgcccaggttggtcttgaactcctgggctcaagtgatcccctcacctcatcctcccaaagtgttgggattatgagtggggcttttttaaaagttaagtgaaataatgaaagtaaggcccttaacattgtccttggcatttgcattaagtgttccattaattgtgctattaaaccagttatgaccctgaaaaatgagggacttgggcagtcaatttgtgtttttccagcgtcaacaatgaggtttatataaattgatatcaaggtataattaacaaggacaacaaaggtaggagaaacattttttgggctcttctatgtcataattggtcatttctattgttgaaatctttacaaaagtcacgaagtcttggcattttgattttacaggaaacgagtagaatgattgtataatttaactgtggtcataatgagctgggttcaaatctgttccaatgcttcctacaacataatcctattggaacccaggactgtgatatcaccttcaagttgtgtttttgtttttgtttttgttttttttagatggactctagcactgttgtctgggctggagtgcagtggcgcaatctcggctcactgcagcttctgcctcccaggttcaagcaattctgcgtcagcctcccgagtagctgggattacaggcgcccgccaccacgcccagttaattttttgtatttttagaagagacagggttttactatgttggccaggctggtctcaaactcctgaccttgtgatccgcccacctcggcctcccaaagtactgagattacaggtgtgagccacctcgcccagccccaccttcaagtcttaaccatactattagtgttatattaataggattttggtaattgtaccaaccataatactgtctggcatgtttgctctcagatgattctcccaataaacaactattgcagttaaatatcacccttggtgtaacgtattttcctaaaatttttagaagacggcaacaattttaaagatctgatatgtaacagaggcactgttgagctcaattatagatatgtattctcaagagaaatgcctctccccctttttgaaacttacaataatctggaaataaatctcagtgatactatataagataatgttttcttaaaggaacactatgtttatcctacgtgcttaatctgctttgtggatagtccttgaaatcattgacccatgctgtttctatttttgagatacttaaactattttctcatctagatgttcccatctctaatgtcacaccttgtatgggtttctggacttctctgtacctttcatattcttttagtctcgagggtaccagtccctagtctgctgagccagttttacaggctcagccaaaataagaaaatgaaatgaggcacagggaatggacttgattaatctcttaacatttgtgagaactttggtattgcctcttcactttctaatttcagttgttcattttaaacctagtgcctgttttttttttcaaggctatgttaaatgaatttagaatcccagtattttaagaaactagatgaagtcctctagtctcttgctcctcaaaaagtcacctacagaatcacccaggagcttgttggaaatgcagaatcttaggtcctgccccagaattggaatcaatctgtttttttaacaagatcatcagatattttgtatgcatatcaatttttgaaaagcactgctgtaatctagtcttggatttacttagaggggaaaactagtcagtggtttattcaacaaatattttagtccttgtgttcaaaggggtcaattaaaaaccgtgttttgggtgtttaaaattagaggagaaacgatttgtcataaaatgaatcttccaacaatgataggcacagggtcctttgggacttagtggattaggcttagaggtctactcagaggagctgacccttgagattttccaggtggtcaaagaaaagaatagcatttcatgcagaagagctagcatatgtggagacaaatagaaatgtgaagatggcatgtttggggtttttgcaagcatgatacagcagagcatgccatcctaataagagaagtggccgggtgtggtggctcaacctgtaatcccaacactttgggggaccgaggtgggtggatcatgaggtcaggagttcgagaccagcctgacaaatatggtgaaaccccgtctctactaaaaatacaaaaattagctggcatggtggcgggcggccgaggttgtagtgagatcgcgccactgcactccagcctgggcaacagagtgagacttcgtttcaaaaaaaaagagagaagcgagagactggattgtaaatgttgcttttgtcctaaaggtaatgacagctcacatttactgactgcactgtgccagacatggttgtgaacagttcgagttaatcttttttataacctatgtggataggtaccaattttattatccccttctctatagacaaggaaataagcacagaataagtcattatatgcaaccagcgtccaagtcctggtagtcaagggaggagagtgattcaagaatgagggaataatcaatgcagcaatgaaaattgaaggccaagtttcataagagctgaaaatccccactggatttggcacttggatccctggtgagttcaggtgcaattttaattaaaagctgtgtgcaggccagattaagatgttttaaggaaagtatgggaagtgagaaaagagtccatattactcttgaaagtttgtaaagggaagcagaaacttcatggtatagggcagtggagctctagagtcaggtctggattttaattctggttctgccatttgtgtgtgatgctgagtgaactgtgctaaacgtccaaggaaacctttgtttcctcatccagaaaatgaaactaatacctactttgtagggttggtatgaagattaaatgagactaatgtgtgtgaagtccctggaatacagtaggtactgtataaaatgaaattaaggttgtggagggtttgtttttaaaggtgagaatgttcctaggttaagaagaagctacagcctagagaggctgacaataaaaagggtctatactgagaagaatggggtggtctgtggtttcacagctagtgaaaccggctgtgtctggtgctcactccactctgcaagtcagaagcaagagaagtcagccccagagtttctatttggaggagcttagaaacaatcttagaaagtgggtgctaaggcagatttctcttaagtatgcctaccaagcacactgcctccctgtctggggtgtgcgattggtggtggattggaagggaactaatggagattgtgggtacgctcaagcccttaacaagcctcccttttcgcagatccttacccgagggctctctagcaactccagagccctctagattttcttctcacaagctttcataaccgtctcttttcgagggttttcctctgcgcagttcttcgcgcgggacctcaaagtgcgtgcccgcttcccttccctgcagcactaaagacaaacctggcgggtcccccggagcggtcccaggcgcgcgcgctcgggagcccacgggccacacccgcctcctagcaaccggagctcaggttcagcctagagagagaggaggccaccatggaccagccagccgtcgccaccgcttccacctcaataagggaagacctggtgggtggagaatcattcatcacagcttcggtaagatggcctgccccttgccggcctggctcctgctcccctcaccaggcccactacccttttcccaccgctctctaatcccaggccttcgtgcccctctcgttccctcttcctacccttctctccctgccctcacgcacgtctccacctgcggaccttccttcctggtctttattggacatttcctttgttttatttcttttccccttgcttcttcccttttccttctccttcgccctttgttttctgtatttttcccttcttcccactactaattaaactggacaactgctttaatatggtgattggatttctttccctttccgctccatctgccggaagactgggtttttccttctgtagttttactagacacgttttgctccgcctcctactttaatatttataaaaatatttgaagctacttttgctacgtttttcttttagagtctcgctctgtcacccaggcaggagtgcagcggtgtgatctcggctcactgcaacctccgcctcccgggttcaagggattctcctgcctcagcctcccgcgtagctgggattacaggcatgcaccgccatggctggcctttgttacattttaaaataaatgtgggtgagggttgtttaacctaatcttttatctttccccttagagtgaatttaaagtggtagatagatggaatttagatcacctgtcttgggcaaaacaaaacagcagctgccaattgtcttccattagattgatcgcgtttacttctctctccttcccatctcattttccttattctggggtaggggtgggaggcctgtcttgacctgcctgagaaagttgtatttctgtgactataaaagtgcaacagagaagattcaacataaatctcgcgaagaagtatcaaagaagaagctcagctttagcagtgtcatgagaaaatgttttttaaagaaattaacatatttcataataaaataaagcccagtggtactcataagtacagtagatttaagttactagacaggaagaatgaattatatcagttttactgattattacttttaatgcagtcttgcttgatgacctatattttatagtaataaaggcattataaatgaaaggagaactcaacattttaatgattttatctaggacaaacagcaatatactaaacggttgtgttctgtggacaatgggctgaaataaatatgaaataataacggatgaatgggtatagagtactaaatatgaagacaaaagcttccttggaaactgaggaataccaaaataatcagcttcttaacttggcaaatgggatgttaaaaattaaagctaccatttattaagcactgattgtatatgcaagtctttataagtacaatgccttagtcttttttttccccctgaggtggcttcttgctttgtcgcccaggctggagttgcagtgatgtgatctcggcccactgcaacctctgcctacggagttcaagtgattctcgtgcctcagcctcatgagtagggattacagccttctgaggagggattacaggcatgtgccaccatgcccagctaatgtttttgtatttttagtacagatagggtttcaacatgttggccaggctggtcttaaactcctggcctcaagagatccacccaacttggcctcccaaagtgctgagattacaggcgtgagccaccacatctggcatacaatgctttattctcatgccaactctggtagtgccttatttttatactactgtgaggaagcacgagggttgggtaactcacccagtgcacctagctggtaagtggcagagctgagttccagcctaagtcggtctggcttcaagcctaactcttttcttcctaaggacaccacattttgtcacatttaagatacttacaacatctctgtgagatgggggtgtttattactctaattttatcaaagggaatttagttatttgaaaggacttaagaccataaaataacaatttaaggaaatatgggcaaatttattattatgtagcttttattttaatgaagacatatcagttgggtatgggtgtgaatttcttcaagcaaatgttttataaattatatttaatttcgagggatcacctctcaaatgaataagcatactttgtgtttgttaacagaaaccagcccaaaagacttcctcttttgaaagagaaggatggtggagaatagcattaacagtatgtacattgttcagtctttcctattcacattattcctattccattaatattttaatcaattatagcttttaagactaacactaaattgtaagaaaacagtgattgttcagatctgcatggacctcatgtcatacttaaaattttagtgtcagcatatgaataagaaactaacttttaattttgaatgcaatagaagcttgggaaagttaaacaattctagaaatctaggtgctttacagaatatctagataaggctaacctatgctcttatgatctgggtgagattgcaaaacaaaaaaagcatacattctggaaaggtgttttggtttcagtttttatcttatatggtaaagaccttctgcaaatggttcttaatatggtcaatatatgaaagcaaaatggtaatatatggaagaaaaatgaccagaagatccccctcaccagagagtttctatattacagacatattttctgtcaatgcccttcaataatagagggacttcatgggtcaaagccttcttggaattgcagtaattttaaaggcagaactgagctgagtgctcagtggaaagatggccacaaaagcagcagtgactaaacgttcaattctggccattcagccacactggttgtaatttgaaagtaccaaacctcttattggactaactaggccatatgctctgccagtttatcctggtgtcatgtcattatccttcagcttcccacttgagggctagagagaaacatagtattggctaagcagatgtaggatagcttctagttagccaagagactatcctgagtggtctcactagaggtctgaaattcatagtcaagcttgaatcccaaagttgaatcaccgaagttgccttttaaaaacttaaatttcggccgggcctggtggctcacgcctgtaatcccagcactttgggatgccaaggcgggcggatcacaaggtcaggagatctagaccatcctggctaacacagtgaaaccctgtctctactaaaaatacaaaaaaaaaaaaacaaaacaaaacaaaaaactagccgggcgtagtggctgatgcctgtagtcccagctacttgggaggctgaggcaggagaatggcatgaacctgggaggcggagcttgcagtgagcctagattgtgccactgcactccagcctgggtgacagagtgggactctgtctcaaaaaaaaaaaaaagttaaatttcaactctaacccgtttgctataattcagcaattatttcagaaaggaaataatcatgattttgaaatactcttctgtcaagagtgtttactgtatttgatataatttcattaaacttgaaaacaaagagagatgttacttgggagcttcccatccaagaatggtgttttaggagaagttacatgtttacacaatcttaaaactgatgtcaattttccacaggatactcctatacctggcacttaccacttgaaaacttttattgaagaatccctattaaatccagtgatagcaacctacaattttaaaaacgaaggaaggaaaaagccacctcttgtgcaaagaaacaatccagtcctaaatgatcttccgcagtatatgcctcctgacttcctggacctgttaaagaagcaagtggctacttactcattcaaagacaaaccacggccaagccccagcacactagttgacaaagatcaggtaaagcgctactggcagattgctttgtgtgggaaagctactaagagcccctgaggaaagtatttttatacgtagagtatatcttcccccaggagaaatggaaaacctttaagatgtcttatttcccgtagaaatcaaacaaggactgcctgatttgcaaatgtttccagtaagatttttccctataacatcttcttaacctaaggggagtacatggggagaaatgttttcctcttgggcaactcttggtgggattcccctagcctggagagcacctgggatcttatctgtcattgggctatgctcttatctcttcaagcagtatatgtggtgaaccctcttcttttaaagagaaaaccctgcctctcggggagtatccttattagagcataaatataactacataccacagggaagcttttaaaaacttttcttatagaaatgacccatctctacaaaaaataaagaaaaatagccgggtgtagtagtgcatgcctgtggtcccaactactctggaagctgaggtgggaggatcacttgaggccaggtgttgtagatcagcccgggcaatataacaagccctcaactctttaaaaaaaaaaaaaaatagctacttgggaagccagggcaggaggatcccttgagcctgggagtttgaggctgcagtgagctatgattatatgactgtaccccagcctgggtgacagagtgacatgctgtctctaaaaatattttttttaattaaaaaaaaaaagaaaagaagtgagcatgtggtcccaggagggtcagcttctactctcagctccaccagttcatttgtagcattgataata

SEQ ID NO: 275 - DNA, 1128 bp, Homo sapiens
agtccgagtggagagagcgagctgagtggttgtgtggtcgcgtctcggaaaccggtagcgcttgcagcatggctgaccaactgactgaagagcagattgcagaattcaaagaagctttttcactatttgacaaagatggtgatggaactataacaacaaaggaattgggaactgtaatgagatctcttgggcagaatcccacagaagcagagttacaggacatgattaatgaagtagatgctgatggtaatggcacaattgacttccctgaatttctgacaatgatggcaagaaaaatgaaagacacagacagtgaagaagaaattagagaagcattccgtgtgtttgataaggatggcaatggctatattagtgctgcagaacttcgccatgtgatgacaaaccttggagagaagttaacagatgaagaagttgatgaaatgatcagggaagcagatattgatggtgatggtcaagtaaactatgaagagtttgtacaaatgatgacagcaaagtgaagaccttgtacagaatgtgttaaatttcttgtacaaaattgtttatttgccttttctttgtttgtaacttatctgtaaaaggtttctccctactgtcaaaaaaatatgcatgtatagtaattaggacttcattcctccatgttttcttcccttatcttactgtcattgtcctaaaaccttattttagaaaattgatcaagtaacatgttgcatgtggcttactctggatatatctaagcccttctgcacatctaaacttagatggagttggtcaaatgagggaacatctgggttatgccttttttaaagtagttttctttaggaactgtcagcatgttgttgttgaagtgtggagttgtaactctgcgtggactatggacagtcaacaatatgtacttaaaagttgcactattgcaaaacgggtgtattatccaggtactcgtacactatttttttgtactgctggtcctgtaccagaaacattttcttttattgttacttgctttttaaactttgtttagccacttaaaatctgcttatggcacaatttgcctcaaaatccattccaagttgtatatttgttttccaataaaaaaattacaatttaccc

SEQ ID NO: 276 - DNA, 450 bp, Homo sapiens
atggctgaccaactgactgaagagcagattgcagaattcaaagaagctttttcactatttgacaaagatggtgatggaactataacaacaaaggaattgggaactgtaatgagatctcttgggcagaatcccacagaagcagagttacaggacatgattaatgaagtagatgctgatggtaatggcacaattgacttccctgaatttctgacaatgatggcaagaaaaatgaaagacacagacagtgaagaagaaattagagaagcattccgtgtgtttgataaggatggcaatggctatattagtgctgcagaacttcgccatgtgatgacaaaccttggagagaagttaacagatgaagaagttgatgaaatgatcagggaagcagatattgatggtgatggtcaagtaaactatgaagagtttgtacaaatgatgacagcaaagtga

SEQ ID NO: 277 - DNA, 38643 bp, Mus musculus
  misc_feature (7298)..(7589): "n" at positions 7298 through 7589 can be any base.
  misc_feature (12267)..(12307): "n" at positions 12267 through 12307 can be any base.
  misc_feature (21481)..(23275): "n" at positions 21481 through 23275 can be any base.
  misc_feature (24717)..(25512): "n" at positions 24717 through 25512 can be ay base.
  misc_feature (30600)..(30619): "n" at positions 30600 through 30619 can be any base.
  misc_feature (32433)..(36269): "n" at positions 32433 through 36269 can be any base.
tcctaatgatgggaggagcagctataggctgggaacacagctccaggaggctggagtggatgcagcaggaagaggggaggtggtccagcagtcattgccatggtgtggccctaacaagggacagcttttccctgaagacccagggtggaacccctgaagataccaaaacagcctcagtcccccagggggtgctgttggggctggaaggtcagcctcctggccctcttttgcttgccttccctttgtctccatcctctctgtctctgtctgtctgtctctctgtctctgtctctctgcctctctgtctctgtctctgtctgtctgtctctctctgtctctgtctctctctctctcccctacacacttgtggaccctgtttgaacactaacgatttctatatcagtgtgacttgtgacttgctctaaacatgctgtcttgcatctcagtccatagcaggaaagggcagctctataaacacagcaacggtggcaggaaacgtccttgatctcacagccaggcaagaggtgtcctcacggagcacaaaccttcccagtgctcctcagtgctcctcacccagaagccatggctcctctctcttgactctggagtgagtacagttaaatacagagcaaaggctgcacctgggaaactggaggactgtcggggatctactgtttacggctgttttcctgccatgacgacagaacagcagccgcaaagccccaagtgtttactatgtagccttttctgaaaatggctgccagccctatgctgtcattgggcagagagcgctgtggtgatactctgttccacactgacagtctggatggagcagggtgacaggctggagttcactgtaggtgggaggagaggagggagatgggagatggagggtgtgctatgttcccttagcaaatacgagagtagccccggcttcccttcccagggcactggtcagcatatggtactctgtcccatgcagcattgaggcaggttggtgatgtactttaagtgtggtttgtcacccaaggatccctgtgttggaacataagaggaggtggcagaacatttttgaggcgatccagtgtggggcctctgaaattagccactagcagcctctcaacatgtaatgagtttatacaggacctgggtatatagatgcataagcaggcacacaaatcaaatattttctgacaatcaaattttattttaaaacaagtctttgatatatatatatataattttaatttattaaaaactaaactattattaaatattaaattaacatatcagtgctactcaggaaattcttgttatttttaataagtaattaaatcttggttaaatagatagtcctgcaggacatcgaaagtcttcaatggtttttcgagttgatattttgaattataaccatcaacagctttttttaaaaatggggacatttttttgtatgtgatttccacagtgtgctcagaaccatttcaaaaactagttggagactctgtgctaactcctggctaaaattcatcaaatgatactttagaacaacaaaacttgaggcagcaacttttaacagtcaaacattctaacacaggacctgggtatatagatgcataaacaggtataccaatcaaatatttactgacaataaattttattttcaaacagttctttgatgtgtgtgtgtgtgtgtgtgtgtgtgtgtaattttaaattcaccaaggactaaactaatgcagagataccccagtctgatgcttatgtattgagaaatgatggaaagaaatgttacagttctgttatgtttccatgagagaagaaaaccgcttatgcatctcatagtgtatcatcgcctggagtccaagtccacgtgtttcaggcaatgctcgctcgtcagcatggtgaaatgtgatgtcacaaccttggcaaagtgcacatgcgttcagaactgctgcttcagtgatgtcacacgataaaattgccagaaacaccagggccattacgcttttgatttcgaggtaatttttggttgagtgtgggtcagaaactttttaatgaggatattgtttgtgtgtggtttccacagttatgtgaccgcatgcagagggtggggtattcacatagtgttgtggcccacagtttaagagttaggttctagccaggcggtggtggcgcacgcctttaatcccagcacttgggaggcagaggcaggcggatttctgagttcgaggccagcctagtctacacagtgagttccaggatagccagggctatacagagaaagaagaagatgctaggttctagtgggtgatccttatttctctgagggccccaccctaggaaggaattaagatggttctaatgggacccaccccaagatggctttcaggtgttcttttaagtggatcctgatccctaagtccagctcttgcttcctgtctctccgtgtgagcatcttgtcacatgtaccctgtgacatcctccgctggtgtgatgcagccagggagtgcctcaatagagccagcataatgctatttggattttcagcttcccaaaccataagttaaaaaaaagctacgtttctttaccaactcaccagtctctggtatttcattccagtagggggataacagactaactcaactgggaaatattactgttgcagaacccatataagctactcaaatcagtgcattccttgctaccctccccaatgttctgggttctcaaatgaaagacacatacacacacagggcgccttaaaatataatatgtcttaaacaatggttgggccacttttctaacctccaagtggctgatggacttttttgacaatctcaactcatcccttactaaaacctattccatcttggctgccccagaccctgacctgcagccctcctaggccacttttgcatggtggctatgctctctcttctgcactgcttaggcctagtgtctccttcttccttcccagcatggcagctatccttcctcctccctcggttccttgtccaggaattctaaaagtccccctctgtcttcctgcccagccattggctgcctgctactttagttaccaatcaaaaccaaatgggggcagggatcctcagcatcttaacgtgtggacaagtggcttctcctacaattttgaggacccaattcacataatacgagcattatatcaaaccacaacattacttttagctgagtggccatgagtcgccttgctacccccaggctttttaagtaaaggagatgagaagagtggagtataccagggcaggcagtctctgccacactagtcaagaactcaggcaaagtgtgtaacacgttcaaattgtgccgatgttagcgatatatatatatatttttttctccattctctcctcaaatatttatgaagccctcagttatatgagggtctagctaagtgccctttatagacaagaaaaccagagaacaggagccaggttttgagaggaaatagtttttaccaccaaccaaggacctttggggcaattgttcccagactctgcagggcaggagcccagtctcagagccagcgagatgtggtgcctgggagcagccatctcctgaggacaacctggagccaggcccaaatgggggtatccctggactcctgaagggtcagctcagtgccagaaggtgacagcttacagagccagagcctatctagggttttgggttttgtttttttgactccttgtcttttcctgactccctttgaaacagcaaggctgccctccacacccctgtgcatggcactgcactggaaatcagagaaactagatactaaaggtgggtttcccagtctctccttcattatagcaaagactgtgtgtggcatgtgtgtgtaagacaatagctccagtgcatgggtgtgtatggctgtatgggagggcatgtttgtatgcataactaagcatatgtgaatgtgtgcatgcatctgtccaggcgtgctgtacacagggttcattagtgtaccttaacagcgttctgagaggcttgacagcaatgtactgagtttgtcttcgtctactgttacctgcttcagagtggagcatatgaacgcttgtgtcgcggatgattgattgattgattgattgattgaatggcatatggcacagttaacaacagcatgagttctggagtcagccagagtggagctctacacctctctccgccactcactgagttattttagcctcctaacctcgtagcgcctcagtctccacatctccagagcaggcaagagaccctgatccaccctatctatgaacctcagtgtgggggtgaaggaagagtaatcaaagccgccccatttcaagctggcccagggctctctcctacgggctgccgcacagctcctcccccacagttcatgggccgtgtggtagcacaaactcttctcagtgcgcacccatgcaatttcatacttatggtccgtggacatccaagaagagctcagaccttaacttacaatccagggggctgatgcttaagtcctcctctaggtggcgccgcagaaaggaagcccgactactgagtcatagtgccccctggtgttcattgacataaaaatgcaacaaatggggagctgttctagacgagactaaatatggaggtgaggggatttcaatatgataaattgtatcatagacaggagcaaggcaaatgggaggcagatgtgctggggagagagagaaaggaggggtcaagtcatactaaggaaattatcatgaataatgttaacatctataattccctctccacctattatgtacctgatattggactaagctttcatttccttcatcaacacaagtgctacaaggtgtgtttggagccgtctgtgcagtagatgctcattaccctgttgactagatgactgctttttacatttttttattgttttgtgtgtgtgtgtgtgtgtgtgtgtgtgtgtgtgtgtgtaggtttgcacgtgccaacaggatgcacgtggcgttcagaggacaacatttaggaatcaattctctccttccatcatgtgagacctagagatcaaactcaagtgggcaggcttggctacaaacacctttagtcaccgagccatcttgagggcccaagatagctaacatacttctgagagacaaatattatctcaatttaggaaactggatgcacaaactcgtggccaagaaggcggcagtgccggggcatgtgatgcttgtgacctcacaccagctctgcctccgggagggtggggccttaccttcatgggatttgccttttcagcctccccccagcctctgggtactcggctctgcctgggatcggccagcgatggctatttatggctcagggaggcgtccagtgaaactcccctcataaattatgaagggagacacatgtgggtcaggacaggagaacttggtgcatgagggaaccccgggactcttgctctctctaatcagggattttccttctgttcccaaggaagcagctgctgcagatggcagaacagccagcgtcgcaaggggtcccagggtcctctcaggtcctgctgtttgggctcctagccctgactgctgacagctctctgcctcgtcccctaaatggggctgtctgcattttcatggttcctatgcccacacaaggagggcttgaacagtgctggatgttttgtgccctgcccattctctctctctctctctctctctctctctctctctctctctctctctctcctctcagctattttctgagcatgctcagtcttgctctgggggtacccaaaaacctggatcccctggagctatccctttccgaatggcccttgacacctggtttgagtgtgtggtgtttctttttttatgctgtagtttcttggttattgttagtcttttgtttaaatcctatctacctttaactccctctagcaattcattcctccctctgacttgctaatctcaagtctctaacctggtcactaagcggctagcattggggagatgtggaagaagcctgacagaagtcaggggttgagaactttcttctgtaaatgaaacatgccagtctccatgtggcctttgagcttcgatggctatctgtctgtttgagacagggcttgccgtgtagcccaggctggcccacgccgaaggtgaagtggggagtcagctggagtcgggaagattgcaccagcggctgcttggtatgtgtgccaagcaacggaggctttcttatttaaggggcggactgaggggcctgggtgactcctctctccctgggacaggtggctgcatgaaatgaggagccgggacgggaggagagcaggaagcatggcagctcaggacgggagcccactgctgacagggtgtctggcttccaattacactgcctcagagctccacataaaattagcagcagcgttctctgtaaaaggagccagagaaataaccacattcagcagaaccgcaagcagggacggaagacagagggagaaagggcaggcttggcccagcgtggactccaggtcccttctaggacacccttggcccctgctgcccaggtggctcccaggctgagtcaggaacacaggataatcctgcaggggtcggggggggggctgagtgtgggagtgtgggaagggggggactgaggggacctggtcaggtggcctagagggctcaacacacacacacacacacacacacacacacacacacacacaacacacacacatgggtgggggagggagagggagaggaagagagaaagccaaaaagaaaaataaaggagaaatggtttagaatatgttggcttgtgggaggacatgctgcccttgtgtgtatgtacttgagtgtgtgtctgtgtgtatgtgatgtgtttgtgtatgtgtgcatgttgtatgtgtatgtgtgtgtgtctgtgtgtgtttctgtgtgtgtgtatctttgtgtgtttctgtatctctctgtgtgcatgatgtgtgtatatatgtgtgtatgtgtgtgtttgtgtgtgtgtgcatgtgtgtgcatgtgtgtgtatgtatgcttgtgtgtacctgtgtgtgtttatgtatatgtgtctgtgagtgtatgtgtgtgtatctgtgactgtatgtgcgtgtctcctgtgtgcatgtttgtgtatgtgtgtctgtgttctgcatatgcatgtatgtgtgtgtgtatattcgtgtctgtgcctgtgtgtgtctactactgtgtatatgtgtgtgtgtgtacatgcgcccccaccaagactccatcagagaaaagtattcgctnnnnnnnnnnnnnnnnnnnnnnnnnnnnnnnnnnnnnnnnnnnnnnnnnnnnnnnnnnnnnnnnnnnnnnnnnnnnnnnnnnnnnnnnnnnnnnnnnnnnnnnnnnnnnnnnnnnnnnnnnnnnnnnnnnnnnnnnnnnnnnnnnnnnnnnnnnnnnnnnnnnnnnnnnnnnnnnnnnnnnnnnnnnnnnnnnnnnnnnnnnnnnnnnnnnnnnnnnnnnnnnnnnnnnnnnnnnnnnnnnnnnnnnnnnnnnnnnnnnnnnnnnnnnnnnnnnnnnnnnnnnnnnnnnnnntattcgctctgcttgtgacgtcaccactctccgagtcagaggctctttagagaccctcagaaacaggcatacctgcccacacacagttgtactcgtctctgcacaaactggccttgaactcctggtcctcctgcctccacgtcctgagagctgggattacatgtgttcttacccttgttttatttggtgctgggactgagccagggcttcactcacgctacacaagtgctctgcatcccagtcccaaaccagcacattttcaagccaggacaggcatgctgtgacacagtctctcactagtgctatgtgacattctcttgtggaagcaatgtcaccatttcctgtttcatgaccacctgttgaccaacattctcctctgcaggggccaagcttgtacctctgtgctcacagacccccctcttccactgcacccctccttgctcccctggttgtttcctccaaaagctgggacgcctgagccccgaggcccagccagagcctctgaatcatgtctagctcctcaggtgtgaattcttctgaagtccaaggcgcctggatttgcagttttgtgtagtgctgactccgaactgcttcctcagcacagttcagagccagcttttctctggatttcacaccagtgggggcttcaggctcgaggctctgaccctgtgcattagctccctctgtctacccatggctggagaacttccttcgcttcctcgggcacccaggccaatggctgagaaaccctctttggtgtttgctgtgatatccagcttcacatgagagctcaaggtggacttcctgccagcagtgggacatgtgacctgcatctggtctctggccagtcactggagcctcatctttagtaacacatgtgtttgccgttccctaggcctgggtatcagtctccatcctcagtcatgggtacaattcctgctcgtcttagacctctcagatcacctttccttgtcttgagcagggatttgtatgcttaaaagagctaactctgtgaactgcggtacttctgtgtgctgggagtaggtcagaccgtccattctacgttcctctaccaccctgatctatctgtgcagtgcaaaggccttgatgaacatgcagtcactggtggagtgtccctctcccactttcctgtcccctcctgtgactttcttcatcctcgtttctgtctccccaggagcccatgccctgcctggccacggggagggcagttctcactgggcagactctatcctgggagctctaggttcatcctctctgggctgggtcagggccagaagatcccttcagggtgacaggatggagggggggacattttaaagtaaggatcctaaaacattctatattcttggagccagatcctgaggagtctgagactgcttccaatccagccccatttaaggtgagaaacataggcggttccagattcctcagggggaaggccctgtccccacagccacgttcccaagttggggagataggagcctgattcgggcaggctgggcaggctgccatctctccttctgtcttagcataccatcaagtggagctggggggtgggggacattctctgggctgctgggcccatcctcactgtaggctttggagagctccctacagaaacaagcattagaaggagccgacgaagaacttcctccttctgctcacataatctgggtgtccgcagtgtagtgctggcctggaagaagcctaacacacaaacacacatttggaacacactggggtagggaacccctctggtgagagcttgccgcaggaaaagcccagagagtggcagggagggtctggtgaggacaggtttgtttcttagagggcagcttctgagctgagacctacaggagataggagaggagcgttgggaatgtggtggcaatgagggaagagagattgggagagcaggcagcccacggggccttggggattctgaagccagcagcgggggcttggggcttttctgagagctgagtagggaggtggaggcagattgtaaggagagagcctctgtgtggatggaagctctgggagagctgaatgtggtatctcagagcccagagccccagatggggcataaaacaatgacttcctagtataagagggagggggaccaggagagcttcctggaaaaagcactatctccaccagaccttaggaatggcaggtcttggatgcttgagaaagggattcaggaagaagcctgaggaggaagtccacaagtgtccttgatggactacccagggctaaaactgctctatggtgggtggagctcagcaccagagacaggcactgaggaaatccccaaagccagtggcctcacgcaagcccagcacccaagggtgccacttcctcaactgctgtgcagctgggaagtggctgagaagacgtgtgagggccaggcagctcaaagcctgaaggaggtacttcaaggagggtccagagaagctgggcagggcgggacctcctcaaaggctgcccccggggacaccccaagcttcaggaagctctcagatgcacataggaggaagtgagaggtgaactcggcctggatctggttgggcaaggcccccatccatctgcttttctgactacccacagccatggccctggcccagcagctgcgatcagagaggtgagagtgtgcctctattccctgccaggctttctcaatgatcccaataggcctggggggtgggtatggggaggtaagaggctgtccctcctgtcacctgatatcagtggatcagcacagagtcaaatttgaaggtcttgctgaatgatactgcaggagctgcatgctccagcagatgtttctagaaccttgacttagtaggtcggcagtgttatgcaccagtgagaagcctaaggctcagaatggggagtggcttggatgtggccaaaggccacagggtgagtgggcggcagagcctgggagcagaggtatcctgggtgctaggcttgggttctgggttcctggttccacactgcaatcaggagcggctcttccatctgcccttcagactgaaactggcctctgcgttttcctatctttaggttcagatagcccaggctctgccgtctgacccctcactccacttccttgtcctgaacaggtcttggatgcttggcacaatgttgggggccgggtctctgctctgcctgctctgagggtgttttagttttttggatcacagttgtgtctctgggaggccgaacggccctgggacacactgagagctcaatacatctgctaagagctcaaaaatgacccagatctatcttggacaatgctgacactatacaggtagggacaaggagacctgatggccccaagcccggccacctcattcagtcagcccttgctcagtgtctcttatggagacagccctgtgttcccatctgcatgtggagactcaaatgacagaaccgtcccctgaatcaagcagaaagcaacgttaggaagccaagtgtccatgtgaactgcttgagagtcaccagaacaggtctgactgacaagacccaggtgtgagcaaagcactcgtgggatctggaaaaagggatgggattcctgtaggtcaaaggtcagaggaggtttgtctgtgtggtaacaagagttagtgttgggtgggggtcagatggccttccttccatagctatagagagtgttactggggtgctaagtaaggctgcataatatgaccccagcctttctcacccccaagttctcctaggagactgacagacatgcaaacttgaatcttctagaaactgtagccacttgaagcttgggtcccttcttgtttcttggggtgcagagttcagatggtgcctgtaaggactatcagggctcagtgtttcctccgcccactctgccctttccacagctgttcccccgccctctgaggggggcggctcttctcctctgcccctgataggaccatggacccaggtcctagggccatcagacccagtatctccagcgtcctctttgagaaccagtccggcagagatacagacgaggagatatcatatatagtgtctcttcgagggcagctgcagagtttagctcccatggccacatgtcattccagctcccactgtgattgaggtaccacacacctgcagttttcaggactcccctagatcaggtccccaagcgtacctccatgtgtagctcccgtgtgcacagagcccggtggtatccacccaacaaaacccgtgtggggtccaagggggacagctatcttcccagtccccttccctctccccacaccacagcctccttggcagctcagctgcagacggctcacactgggacaagtggaagtagccgctcaggaccttctaggcgcctggcgccgctctgggtgcttaggggatgcagtgtgctcttatggggtggcagggatttgatgattgtctccattttcagagaggggtgggaggagccggaggatggggagaggccccacaaggtctcttctgacagggagctgagtgaattctggtcctagtccagggtattatctggccctgtctggcctagtatgtcttctgacactagcgctgcccagacacttctggtttctcctaccccagagaaaggttgctgttcttccacgaggcaggaaggccccttgtgtgnnnnnnnnnnnnnnnnnnnnnnnnnnnnnnnnnnnnnnnnnctccctggtgccatagccggctctctgtgctttccttacccttggctgtagggaaccccactttcccatggcaatcctaacgtccccacccccaccccaccaactgtcttctgctccactgttggtgtcttgaagaatgtgatgcgggtcacctgtggaaagtccttggcccgtgatgaaacagagggattacttcttgggtattcaatttccccactcctcagagctatggagtacaagaagcagagagcaggaccccgtgatgctaagaagtgtctgttctgtgctccaggctgcagaatgcggggaacaggcccagtgctgggcttcatccaaggtctctcagcttctttgtctcgaatcccactcacctcacctgggcaagctccataacctctcggtgcctcaccatcaccctaccccagggtggctctatctccaaggagtaggtgcccagttcctggtgtggtgtgagcactctcagccattagtgttacccaaacttccagaatggccaacggctatttttccctttccagttccctcctgccccaccccagcttctgggggaagtgggtgaggccactctttcagaggatgtcctcatgggacatgttgaaaagcgagtgggaaggccccagtgaccacagaggtgccccagcctgggggacagcccctgctggtctgctgacttccccagtcactgcctggtgacttctgaatccagatacaccatcctgggacagaccaggtcccaggggaccagagaaccagcatggactctgtgcagggtgtgtgggctcctagggatcccatactttgtgaggtgtgggacaagtcctatctgtctctcaggcactgctaggagaacccaatcacttcttcagctcctcctcctcctcaccctccttttcatcttcctccatttccatgttcccttctccttcctctatctcgccctccttcccccttccttctcctccccctcctcatccttttctcctctctcccctctgtcttccatctcatcttcattggaattctattctcctcttcctcctctcttcctcctcctccttttcctcctctttctccttctcctttttctcctcctcttcctcctcctcctcctcgacctcctcctctatctctgcctcctcttttgaaacaggttctcactttgcagcctgggctgagctagaactcctcattccatcctgactccctctcctcagcctcttcatttctgagatcacagacatgtgccacctatgcctgcctacacccacttcctgcttcctggtctgtacacaagtgacagacggttgaccttggctgtgcctggtggccggcttcctctttctctgcttgcccttctcaaccctctccagttcacttaagggtcttaagtcttagccatagccataagccacaggcaggtggctctcactttaaccacacgtcagccccactctgccatctccacacctgcacaccagcctcctgctggatgcctacctagagacatctcaccttagtgaggcctgagcagccctgcctcttcctgtgctggtcagaaacaggcatcactcttgtcgtggctctttctttcagtccaggttggctgctataccttggtcatgtatcccttggaaatgcattagactgcagggaaaggctggtctggtcttggcttaaatgatgaccagttgttctttttcacagtaaaagtccagactgcaactcgttccatagctcagggggctcaaagccagccctgcagaatttttcattctgcatcatgtttttgcctcatgggtgcaactgtggctgtggatccagatgccaccccaactccatctcattgaccagagctagtcacatggttgtgttgagcctcaagggcaggtgggaataggaataggagcaatgtttggtccaggccaatcatgcctctccaagctagacacacttaacattgagcatggctggcacttgaatggccaggaaaaaaaaaaacaacaacaacaacaaaacaccaaaacagcaggaacatatggaatgctactctagcattgtgctggggttctctatcatttgcatgtcctggccgatatcacccttcactgtcggagcttctcatagagctgtctcattaagtctctccccctccttcatggctggccacctgtggtgacctccttgaaccacctagttccttgatctcaagaccctcatatgaacgtatccaccttaagacccaccaggctctcagcaaatctaaactcttcctcagggctcagaaccttagcacgagccatttccactacccggaagaaccttcctagattccagtgaattccagttgacccaccaagagctcaaactccacctttctgaagcttttccttacttgggcatagtcaacaaaccgatctcttggctgggggatgtgggctgctctctgtctgtcagcctcatggtactatgacaaaatactggagtcaattaatatataaagtaaaaaggtttatttaggtccagggttccatggatcccgcctaaaagcatggcaacccctttgcctgagtctctagagatggcagtgaagtgaagcagaagtgcatggcagagtaaaccaggtgcaagcagaggagctggagaagaacatggtcccttagtccccttcaaggcaatccctggggacccaaggacgtcccatgaggctccctacctagaggtccacaacactccccagtggtgatgtccattaactgtgggttgtaggggacacccatacaaaccccttcaggagtcccagcacacacttcatcctgtgacacagagcctggcacaaggctggcacgaaatgggcaccaggacctggcaagttcttgggtagcttggactagaagccagctggtgacaccaattccagctccgcacccctcattctcagggcttgacctgtgtgtgccctgacatctcggggttcccagcctcagtgaggtgccaggcatggacagtgttcagaatggggtgtgcaggcctccatcagctggctgtgtccagagcaggcaaggtggtaaccgatcccctccctctggcctcctacagcgactttgagcagcttccagacgatgtggccgtctcagccaacatcgctgacatcgaggagaagagaggcttcaccagccactttgtaagagtcagcaatccctgttcccttgacctcgaacctctaatcttccaccttgacagtggtttctctggactgggtggttgctgatatttgctggatagaattcagcggtgcttctaaacacatccaaaagcatgggacaccacactgaaggcttaccccactcagtacactgcagggcttgagaaagcctgtccctctctgtgacctctgacctcatacagtgctcatctcccagtgtctctacctcccagcccctccccagccccccaaccctttccactttccagacctgtccacctctcagctctcctaccttataaagacacccagcctcccggtatatcccccccaccccgttctagctcccctcccccagtctctctcctcctcaggtttttgtcatcgaggtcaaaacaaaaggagggtccaagtatctcatctaccgccgctatcgccagttctacgccctgcagagcaagctggaggagcggtttgggccagagagcaagaacagccctttcacctgcaacctgcccacattgccaggtaggctgcactctgtccaacgcccggagctggccctgaccctggcctcaccttccagctcagcagcatgttatttcaaccctctttgcaaacgatgcatttggctggtgcccctcttgtagccataggctggcagtgcccccctagcagccctctgcctgccacccctctgtcttcagggtaccttcactgctacagtttctgcatcataacccttgacctacctctggggacacagtacagccatcttgccacagccattgctaccaagggagcctgggctgggagcactcagcacctgggttctggtctttcttgcctctctcagccacccatgagggtggctctccagccacacagcctcagcctcaacagatgactgcagctctccctctctggcccttggggaagcagggagccacacatagcttctaatcccacccctgtcccccatctccttcccatatgcccctcgtcccaaatctcccatgccacctcctcccgagcttgcccaagaaagtccttggagatgctcctgactctatcatatcacatcttccctaagcctcagaggcctgcccatcttcccttcttccagcccaccttctgtgggtgtgctgtcccccaaacacattctcttcatccatctccaaaaaggacactgagctgagaggcaaaggacctcatagctcctactccccccacttctgagtggtgaggaggagacaccactctccatctcccccccctttcctacaccctttccctgagctctagtcattttccttgacacaccgcccccctctggagcatgtgaagaggtcccccatcacaccctgtctgatgagcgttaaccaagcagtgctgtggggagcctctgttctgagcctcctatcctgagggctcccccttgtgcccagcctcttcccccattaggcctcctccaccagccttcctgagtcccgtccacctttcttgctgcaggctctgctcaccttgggatgggactctcccccatccttgcctgtctcatcttctcactctgaacaactggtgcctgtgactttgtctcgtcttggtgtgtggctcctgggtagccccaacctttatatacccccctcctggcatcacaggtgcccacctttcctgccctattgcacaggggcctctgggtggcagctcctttaagtgtctgccaaaggctcctggcggaccttcatcatttggaccttcatgcactccgctccgcgttagaggcatggctcattcatccacaaagcagattcttagttctctgaagtgtgagtggggcttggagctcatggtttctaactatggtagcctgctgaaaggaaacttacagagccctcctacctccaggatgccaatgtagtttttctggggagccctatctaatgggatgctcaaaagctcctatggtgacctgagtgttatccaagcctgaagctgggagatcactgtgatccaggcaggcaagaggtcctgagttcagagcgtgcatctgttttatgcaagtgtacgtatttttgtgtgttaaagcatgttgcatctgtgtgcatttgtgcatatacatatacatatgtgtatgtatatgtatgtatgtatatatatatgcatgagtgtgtatacatgcacacataggccttacatgtgtatttgcatatatgtgtatgtcggtatactatatgtgtgtgtggtgcatatatatacatgtcccagactgcaggtgtatctgtgcatatgtgtgtgcacatatgtgagcatgtatatataagttcttgtgtatctatttgtgtgcatttgtgtgcatgcatatgagtgtgtattcatgtgtctatgtgagtgagggtgtatgtgcataggcttatgcatgtctaagctttgcatgggtacatagagtgtgtgtgtgctgtgatgagcatgtatgtgtgttcatgcatacatatgagtatgtgtgtacctgtacacacctttgtgtgtaggagcaggcatgacattgagagctccttctgccttctcctgatggtatgatgggaagatgcggttggaaagtatctcggtgacacttggtaccatgatagaaggcaggaggaaccctgagctggggaggagcattggggaggagctctgggctggggaggagcactggggaggagctctgggctggggaggagcattggggagaagcactgattggtggggcagctgaagagtaggcaccgtatggtccaggctctgggcaacttttctcttttcagccaaagtctacatgggcgcaaaacaagagatcgctgagactcggatcccggccctcaatgcctacatgaaggtacctgctgccacatctccttggggtttgagtgggcagggtattactgtggggcatgagtttgaaaactgacattttcctgaggcctccatgatcccatcttcaatcctgaaaggcctggctggagagagaagcaaggtatgcagacgggatcaaggagctgggtcacaaaagtcacggttgacaaatccttgagtgcaccaagctcaaggaatgaatatttgtgctgagctctggaatgcagtgcctgccccagagcacctgcggcccaggggagacccttacaaggtagtgagcaccctgtcaacagtagcatccaagccatggtctgctggaaagccttcctggctgtccagaggtcctttacagctggagtgctctggctttggagacttttgtttggatgggtgctttggagcgagtaagcagtcctctctcaggaagtctcagcttccttctgttatgagacgaacagtcccaccctccccggctctcagctcccaatgagtggagctgggctctattgagaaaatgaagggaagggggttttagaactgtgaacctgcttctaggttgtaatcctgagggatttcccacagaaatctggatgcttctggaactgtagctcctgtacagtggcctcagcgctccagggtacctgagccctgtgggactgaattggtagccatgccagtccccactgctccatgtcctcacgccttagtcacactgtgtgcacatgggcagagagagaaatgtgctttgtcctgcaagccctccccctttcctcaccctgtcccaatcacttctcggacctgcccccacccccaccccatccaagcactgtctctccttatgattcattggatagagtgcttgcctagcatttgagaagtcctgggtttgttccccagtatcaaataaaatagacatggtggcccacacctataatcccaacacttaggaggtagaggcaagatgttccagtcattcttggttacatagcaagtttgagaccagtctgggctacatgagccctgatatgagcacctccggtgtctctggatgccccagttgtgttactaagctgtgtggctctgtgcagatccttttccctttctgatcctagcttacaggtttctggtgtaatcagcctccttaatcgacctctggagacctttaggtgatttcagatgacctcttaagccagcatccctcccctccccactacccgctcacgctgggccaggagcaaagcttgggaattgtctccttcaatcgctgaggactagtaacgtttttgtttttgttttttgttatcagctgagaatgcattagcagagatggtagacggggtggtgtgttgatagggctgtctagatcttttcgtcgactgcccacctgtccctcctcacacagaacctcctgagcctgccggtctgcgtgctgatggaccccgacgtcaggatcttcttctatcagtctgcatacgatgctgagcaggtgccccaggcactccgcaggctccgaccgcgcacgcgcaaaatgtaagtggccatccctgcacttctgatcccgcgacggagtccaatctctctagcctccaggagtcgctgttgcttcttgttccaaagactccagtgctcccttctcaccctgttcctcttagaaaaatgaaccaggcaggccttgaggcaccaaagtagtgaaatggtgctcgtttccgttcgagccacttctttaagaagccaaggaaaagcaggcaggaatcttgagccctgacctccgccaaagcacctaagagggcagggtctgaattccggctttgcaggagagtttggctctgagagccaggttgaggtctggtggagacttaagggcactgagccgtgatccccattccttcttcaagctctccctttgggtcttctgtgggagagcaacctcacctggggcagtggtgagaatacaagatgaagggctagcggcaagagcaaccaaccataactggtggctgcgcataatctttctctccctgcctctccagggacccacaaggctgataccccattttctttccatagcaagggtgtgtctccacaaggggccatcatggatcgcatggaagcgccaagagcagaggtacccacacacaggctagacctcatccgccgcaactgtggcgccctcctgctgtgtgccactgtgcactttggatggtgttgggtgcacagcatgaaatgccatggcaaagaacagtgggatggatgcaggagggctgtaacccatagggaggccagcgaggcgggggagcagggcaagctaggcacagagtttggattccccccttccaaatgtgaaccctacctgctctgaaaggaccacccactttgtagttgggggagagtagggttttaatcgaagtcctctgcaaacagaggggctgtatcagcacccttccaaaccctcagtttccttacctacagagagggacaccacagtggtcaagcccttcaaagactcagcgttctctctgtctcagcaatgctgtccctctcctcaggccttgtttgacttcactgggaacagcaaattggagctaagtttcaaagctggagatgtgatcttccttctcagtaagatcaacaaagactggctggaggtaagctggggagaggggttcagaatcaggaagactaactagaggcaagaaggagggtgatggcagagtacatggatgatggggtggaagtggaattggaggtgagggtggaggtcagatggagatgagattggaggaagggctgaggtggaggtggaagtggagatgaaggtggagagaggttggatgtaaagttagtgatgagaatggaggtgaaggtggcaatgaaggtggaggtgaggatggaagtaagactggagttaatgatgggaacaaggctggggttgatgatggggtaagggtgggggatggtggtaaggatgggggtgaggatggaggtgaggatggggtgaggatggaggtgaggatgggggtgaggatggaggtgaggatggaggtgaggatgggggnnnnnnnnnnnnnnnnnnnnnnnnnnnnnnnnnnnnnnnnnnnnnnnnnnnnnnnnnnnnnnnnnnnnnnnnnnnnnnnnnnnnnnnnnnnnnnnnnnnnnnnnnnnnnnnnnnnnnnnnnnnnnnnnnnnnnnnnnnnnnnnnnnnnnnnnnnnnnnnnnnnnnnnnnnnnnnnnnnnnnnnnnnnnnnnnnnnnnnnnnnnnnnnnnnnnnnnnnnnnnnnnnnnnnnnnnnnnnnnnnnnnnnnnnnnnnnnnnnnnnnnnnnnnnnnnnnnnnnnnnnnnnnnnnnnnnnnnnnnnnnnnnnnnnnnnnnnnnnnnnnnnnnnnnnnnnnnnnnnnnnnnnnnnnnnnnnnnnnnnnnnnnnnnnnnnnnnnnnnnnnnnnnnnnnnnnnnnnnnnnnnnnnnnnnnnnnnnnnnnnnnnnnnnnnnnnnnnnnnnnnnnnnnnnnnnnnnnnnnnnnnnnnnnnnnnnnnnnnnnnnnnnnnnnnnnnnnnnnnnnnnnnnnnnnnnnnnnnnnnnnnnnnnnnnnnnnnnnnnnnnnnnnnnnnnnnnnnnnnnnnnnnnnnnnnnnnnnnnnnnnnnnnnnnnnnnnnnnnnnnnnnnnnnnnnnnnnnnnnnnnnnnnnnnnnnnnnnnnnnnnnnnnnnnnnnnnnnnnnnnnnnnnnnnnnnnnnnnnnnnnnnnnnnnnnnnnnnnnnnnnnnnnnnnnnnnnnnnnnnnnnnnnnnnnnnnnnnnnnnnnnnnnnnnnnnnnnnnnnnnnnnnnnnnnnnnnnnnnnnnnnnnnnnnnnnnnnnnnnnnnnnnnnnnnnnnnnnnnnnnnnnnnnnnnnnnnnnnnnnnnnnnnnnnnnnnnnnnnnnnnnnnnnnnnnnnnnnnnnnnnnnnnnnnnnnnnnnnnnnnnnnnnnnnnnnnnnnnnnnnnnnnnnnnnnnnnnnnnnnnnnnnnnnnnnnnnnnnnnnnnnnnnnnnnnnnnnnnnnnnnnnnnnnnnnnnnnnnnnnnnnnnnnnnnnnnnnnnnnnnnnnnnnnnnnnnnnnnnnnnnnnnnnnnnnnnnnnnnnnnnnnnnnnnnnnnnnnnnnnnnnnnnnnnnnnnnnnnnnnnnnnnnnnnnnnnnnnnnnnnnnnnnnnnnnnnnnnnnnnnnnnnnnnnnnnnnnnnnnnnnnnnnnnnnnnnnnnnnnnnnnnnnnnnnnnnnnnnnnnnnnnnnnnnnnnnnnnnnnnnnnnnnnnnnnnnnnnnnnnnnnnnnnnnnnnnnnnnnnnnnnnnnnnnnnnnnnnnnnnnnnnnnnnnnnnnnnnnnnnnnnnnnnnnnnnnnnnnnnnnnnnnnnnnnnnnnnnnnnnnnnnnnnnnnnnnnnnnnnnnnnnnnnnnnnnnnnnnnnnnnnnnnnnnnnnnnnnnnnnnnnnnnnnnnnnnnnnnnnnnnnnnnnnnnnnnnnnnnnnnnnnnnnnnnnnnnnnnnnnnnnnnnnnnnnnnnnnnnnnnnnnnnnnnnnnnnnnnnnnnnnnnnnnnnnnnnnnnnnnnnnnnnnnnnnnnnnnnnnnnnnnnnnnnnnnnnnnnnnnnnnnnnnnnnnnnnnnnnnnnnnnnnnnnnnnnnnnnnnnnnnnnnnnnnnnnnnnnnnnnnnnnnnnnnnnnnnnnnnnnnnnnnnnnnnnnnnnnnnnnnnnnnnnnnnnnnnnnnnnnnnnnnnnnnnnnnnnnnnnnnnnnnnnnnnnnnnnnnnnnnnnnnnnnnnnnnnnnnnnnnnnnnnnnnnnnnnnnnnnnnnnnnnnnnnnnnnnnnnnnnnnnnnnnnnnnnntacagtcctggaggtcctggcagggttgggtgacctgtggggtgtcctgtttttgatccagatgtgttggtgaagcagaacattcatgccacagcatatgtgagggaacagcttgcagaagttgaccctctcctgtcaggctggttgtggaagtgaaactagggttgtcagacatggtagcaccctctttatccactgagccatttcacagcctcctccccccacccctgccattctctttaatttcttgatcactaacaaggcttctaggaactgacactctttgggggtggggtggggtcgtggagacaaataattcctgggaaagggcaggctatttagggaaggaaaggcagtcagggtgtttagcagtaccctggtcttcccactaggtgtcaccagtgcacctggtcacagcaatcacataggtttctccaggtttgctttgtgggggtcagactttctccactgagagaagtgaaggctcatatgtaataatgttacttccctaatcagcagcaaggatgactgattaagagtgggtgtccgtgcctgaggcagctcggtagaggagctctcacctagtgtgcaaggccctgggtcccactcaccatactgtgagacaacagaagatctaatgcatttctagctgtccttgtgtacctcaggaggttgcttaaccccgtggtttcctttcctgtgaatgatgaaaacagtttcttcagtggttcccgtcagggacaagggagaggcggatgtcctccaggccttggccccagagagtctaggtgcctcgttcccactgcatgtgaggggactgggaagtcttgaatgtgaccctgaagctgggcccccttgggtgtttctttgctccacactgacagggaatgactgtgccaggtccctgggtctggtcatctctatcataatattgtcaccgttggacattctctggccctcactgtgtctgaaggaggcagggttcccggtatcctgaggctgggcaggagtgggagtggcaggtgtagggatataacactttgagcttctgcctccttgtgcactgggtctcagaagccatgtccacccgagcagtgactgttgtgaccaccactgtcataagaggaactgttgaccgctttactgtcttctggaaagtcttactgtctagtgtgtcgtcactggcagacctcaggctgcaggaagggcctctgtggcgtaggaagaggaaggagcctcagtctgcgaggcagcgggaagaggatgtgattcctggggctgcggagatcaatcaggcagcaaacaggacctgagctcaatcccagagcccacacactaaaaagtcagccatggtggcttgtgcttatcatctagctctgggggagacagagacagagacaagccctgggacttgctgtccagccgcaaaccagctacaaatnnnnnnnnnnnnnnnnnnnnnnnnnnnnnnnnnnnnnnnnnnnnnnnnnnnnnnnnnnnnnnnnnnnnnnnnnnnnnnnnnnnnnnnnnnnnnnnnnnnnnnnnnnnnnnnnnnnnnnnnnnnnnnnnnnnnnnnnnnnnnnnnnnnnnnnnnnnnnnnnnnnnnnnnnnnnnnnnnnnnnnnnnnnnnnnnnnnnnnnnnnnnnnnnnnnnnnnnnnnnnnnnnnnnnnnnnnnnnnnnnnnnnnnnnnnnnnnnnnnnnnnnnnnnnnnnnnnnnnnnnnnnnnnnnnnnnnnnnnnnnnnnnnnnnnnnnnnnnnnnnnnnnnnnnnnnnnnnnnnnnnnnnnnnnnnnnnnnnnnnnnnnnnnnnnnnnnnnnnnnnnnnnnnnnnnnnnnnnnnnnnnnnnnnnnnnnnnnnnnnnnnnnnnnnnnnnnnnnnnnnnnnnnnnnnnnnnnnnnnnnnnnnnnnnnnnnnnnnnnnnnnnnnnnnnnnnnnnnnnnnnnnnnnnnnnnnnnnnnnnnnnnnnnnnnnnnnnnnnnnnnnnnnnnnnnnnnnnnnnnnnnnnnnnnnnnnnnnnnnnnnnnnnnnnnnnnnnnnnnnnnnnnnnnnnnnnnnnnnnnnnnnnnnnnnnnnnnnnnnnnnnnnnnnnnnnnnnnnnnnnnnnnnnnnnnnnnnnnnnnnnnnnnnnnnnnnnnnnnnnnnnnnnnnnnnnnnnnnnnnnnnnnnnnnnnnnnnnnnnnnnnnnnnnnnnnnnnnnnnnnnnnnnnnnnnnnnnnnnnnnnnnnnnnnnnnnnnntgtttcaaataggaaaaaaatgtagataaagactggagtgacatctgaagtaatcctctagactacatatgtacacatacacagacacatgtatgtacacactcacataaatgcacacacatgctcacatgcacatctgcatatgcattcgcacacataagtgcatgtatgtacttacacacatacaaatacataagtatacacatgcccacacacatataaatatagatgccaaaaagaatgcatcttctgtctcgtggccatggaggttttaagtgaccacatgagcaacacagagacaggattgggtctccccagtcctgcacttaggtgagaggcccaagcctccgggtgacacccaaaacctgtggaggagcatgaagcactttcaggtctctctgcagtccccaatgtctgcctcttgccctgatttcccctttacacgcgtagccattgaccacagagggctgctcatgtgtccctgtcgttctgtgccatcaggagtgctgcatgagggaacagtgcttgtgtaactcccggacccatagatcgggcatagtggtgctcgagaacctctgctgaaggaaagaatggatgaggaagagaagaaaggaagaagggagatgggagagaagggagaggagagacaggtgaggcagggagcttcccagataagttcagggctcttataaaactagagtgcaggtcgctgggttaggcagcctggtgaatctcctcactttgcctctctgtgttagttggctctggtcactataatagaacgcccgaggcatctagcttatgaagaagaaaggtttgctatggctcacaatgctggaagctccaattcctgcgctgaggtcctgcatcctgacaggagcgtgtgagagtaaaattcttgcattgtggttagaaagaaaaataaataagtaaaatagattaattaattaattaaaaaagaggaaaggagcaggtccccactacttgattaagggagccctctccctagcaagaaaggacatttctattagtatctatttctccaagctcccacaaccaccctggggaccaagcctttgacacctgatctttgggggacaatctatgacaatcgttgttgtaaagagtgtgggactctgagacgtgaccctgggtctcaccagcctcttctttcacttccagggcacctcccagggagccacaggcatcttcccagggtccttcgtgaagatccttaaggactttcccgaggacgaggacaccaccaactggctacgatgctacttctatgaagacacaggcaaaaccatcaagttggtgtcctgctgggagaacgggcctcttactcctccctgccacccctaccatgccactgtctcccagtcaacgctcctgtgttgtctctcccctcccctgcagctgctgctgtggctcccagataaaccatagtgctttagcaagagcttgtttctggcaccacacacgtccctcttccaccctgatgcttgtctcttctactgtcccccttagggacattgcggtggaggaggacctcagcagcacgcccctgttcaaagacctgctagcgctcatgaggtgagaggttgggaagggagggagactttggagggcaatgggctaggaggggacctgtgacagctccagtctctgcagtacacggtgccttagagaggagccaagcaggctgcagagggcaagggctcagtggaggtcccagtgtgtgactgtggatctgctatcagaacatctctctagcgaaaagccttgtacttggacacacacacacacacacacacacacacagagctggggaaattccaggccattgctgaaaagtttactcatagcactgtcccatctctcacgattcaaaacagcgcagtctgtatgaggactatattgcactcctatcgttagctgatgtgtgctcagattctgtcagcacatgcacaaacatgtgtaggcacactaacacacagacacattcacacacacacaaaaaacaaacacacgaaccaatacacacccaaaacatataacaaatgagcacaaacacacagtgtacacacaaacatacacaaacacacaaagatataacacacaaacacataatatacataacatacaacacaaacacaaaacaaacatgtacgcagaaacacaaatatacgtaaatacctaaaacacagacatacacataaaagaagcacacacactcactcactcacaatgtccccctggccatagctaccattctcaagacctcccgatggcttagcccccataccccggttaccactgacaagaatattgtaaatcttcattcacatataccgtctcattatcaagaagtgggattatgggatggaagtgtatgcaagaggattagactgggatggcacatggggagttagttcagatcttgttccctccagccatgatgaagcatggccctcctcccaaagttgtcactggttcctacaggcctcctgggcagccttgctttctcttaggaaactcctaaaccttccacccacttatacacaagaagcttcaggctgtaccattattggattacccagtgtcctcttcctttgaggtctctgtttccccatctgcagaacaggagtaaggctgttggatgataggccccggtaccacttggatccacagactcaaaggccctgggagaagccaggatccatagactaatcctggtgtgttgccctaggcgtgagttccagagagaagacatcgcccttagctaccaggatgctgagggggacttggttaggctgctgtcagatgaggatgtgggactcatggtgaagcaagcccgaggcctcccttcccagaagcgcctcttcccctggaagctgcatgtcacacagaaggacaactacagtgtctacaacactgtcccctgagtcacagggaccctgtggcaaggacggggtgctcagcaaagggcctttactttccaagaacacggagaccttcagggagactgatgtaagatgcaaacctcctggcccagagtgcctactggacaggattctattaagtttttgacactctaccttttggattcaataaaccattctgtctctaagggccacagttgggaaatgggattttgtgtagggccagggagttaagtgtaattgactaagacctcttacctttctaaacgacgttatggggaacatagtgaacccacatttaataggacattagaaccatccgctaaaagtctctaaaagtgcacagtagggagaaaagagtcactgtccatctgcagagtttgggaactgttgggtctatggtattacatccacagctgccctgccccagacccatggggtacaaatcccgccccagccactttgctttgggtaggtgcagtcaagtagatggagtgccctctccctgtggctcctggtcccctgtacaatgggtagcctgccccaatcccctgcccttcctagccccaggctggcctgtggagattcaaggccaggcagttgtggttgatagcctgaatcccagagctgccatgagagtaccacaaaatggagactaaaagacagaaagaaactgccttgtagttctggatggcagaagtccaaaactaaggagccctctccccacaaaacttgagagaaaccatcctccaactctccagcaccccagccagtcacctcagcctgtcggagcttcattctgatttcacaggagttccctcttgtgtgtcccccctctgtgtgcacctgcccctgtcagactggattagagtccacagcaatggccctgatcttaacttgaccacccatctcccagaactgtcgtgttacacgctgcaagtggagacttcaacatgacattttttaacctggacatatccactcaacctgtaataatcacttcattcatgctgttcccactaaaagggcaagcactctgctgtaggccagaggtatgggaaatgcagctttagtaaagatcacggtttccatgacaacagggagaaccagagtccatcagaagacagtccccctctgggatttacctgtagaaaagactccaggagaggcaagctgacttcactgacatcacccaactctgatgcaaaggctctggccatgaagaaaaatggaatttaaggatggggaaatcacattggtttttcttgaagagaaagctgggaacattaccaaaaataagggaccctggaacaagaggccagtgggcaaagcacttgtcacacaaggggattctaatgcccagaaccgacagaaagcaggatgctgcagtcttgggctctgtaacctcagcactcatgaggcaatatgaaaagaggaggccagagatagccagaaactcataggctagcctggcacgcattgaagtgacaactagagaccctgtctcgaatgatgtagaaggtgaggacacctaaggttgtccgatggcctccatacatagcaccctggcatgcacacacacaaaagacttcaaataacagaagctgtaatgagcgataatgccgaaggggttgtcagctccgagacacacaaggtcagaagcatagcggtgagtccagggaggctcagtcaagatgggctctctagaactgggttgcctctgtggcagcatccactcaggagaggttagaacaggaagtgcttccgacttgagataattccctaaaccacccacagctccctggtagaacatatagggagtctagccagctcaaacatggcgagcatggctctggcaggccttgcctttctcctccattcccttggctttgctaaaaaccgttggattacgtccctaaagctagccaccaggctctactcccttatttgtccatgttctccagctgaggctgactaccaaggtccagctatcaatgtattgaagtcaatcaaacaaaagccccctttggctcacctaagtaacatgcccaattaaaattaaatatcccatcctgacatgggatttccccttgtacctttataaaccgccactttcctatgcaccacgtctgtctcttctgcnnnnnnnnnnnnnnnnnnnngtgtagtggtgcatgtccataatcccagcactccaggggtgggaaggattggaggttcaaggtcactttcttgctatcgtaagttcaagaccagcttggactctctgagacaccctcagtaaaaccatcccaccatcccccacaccccaggacacatacccctgccacctttctcttgttcccttccctccgccctcatcctctgtctcttgtctttgttcttattccctgctctgtccctctggggcaaataaatctcttttgtgctgagaacttggtcttaggggtcttgagcttttacttgacagaactcacaggctgactgatcagtagggctcatggctgatgctgactaagccgcaagctactctgacttgaaggagattggcagggaggcaggcttaccagtggaatagcattggtttcctgggctggaagcctgctgcacagtacacactcaaggctgcctgctctcagggcagactggaggaatgaacttgggaccaaacacaggcaaacttaccaacattctgaatgggcagtgtagtctcccacccccaggccttgcccaagctgaaaggtaaaggtctaactggcagagaggcctaaacccaactgctcaccaataaacagcatatgcaaactaagtcaactccaaggaaagggaccaaaaagaccaaggaggaaaaaaaaatcacagtagagatgttagatgttagagactgcacttagtagggaaaatggacttagtttatccaaacactaaaaatgaactaatgaatgaccaaacaaacaagaacaatattaatctttaagggaaagtcagtatctacagttcctataatttgttatttaaaatgttcagtattcagcaaaaatcatgagaaattagaagaaaaactcgtaatgaaaagatcagcttaggaactttgggaaggtcatgagacactcacccctccgaagggagaggctgattagcatttcacagacaacagggaagggaagtccttgtcacctcattccctaaagaccaatcagtttaaaggctgcactgttccgccagtcatattgagcatagttgctgatgctctattctgcccctggaaactatataaaaacccactgaccagtgctgggggtcactgcctctcattcagatctgagatgacccccagttccctggaacagtaaaattcctcttgctttttgcatcgatcccagctctgcatggttcactcagggggtccctggtaagctaaagctccccagagtcttacaataaaccattcctagaggggtgaagggaagtaggtcatagaactgcctttgagggtggactagatgctggactcagcaagcaaggacctcaaagcggatggtttaagtaagctcaacccatgctcaaggaattaaagaaggtatagggggctgatgagatggttcagcagttaagaacactgactgctcttccaaaggtcctgagttcaaatcccagcaaccacatagtggctcacaaccatccgtaatgagatctggcacccaccctcttctggtgcatctgaagtcagctacagtgtacttatgtataataataataattaaatcttaaaaaaagagaaggtatagaaacaatgagtgttccatagcaactcctactactgaatgagggtgagaacaagaattgtgctgtgcttttattttatttttccttttcttggatattttctctatttacatttcaaatgttatcccctttccaggtctcccctttggaaaccccctatcctatccccacacaccctgcctctatgagnnnnnnnnnnnnnnnnnnnnnnnnnnnnnnnnnnnnnnnnnnnnnnnnnnnnnnnnnnnnnnnnnnnnnnnnnnnnnnnnnnnnnnnnnnnnnnnnnnnnnnnnnnnnnnnnnnnnnnnnnnnnnnnnnnnnnnnnnnnnnnnnnnnnnnnnnnnnnnnnnnnnnnnnnnnnnnnnnnnnnnnnnnnnnnnnnnnnnnnnnnnnnnnnnnnnnnnnnnnnnnnnnnnnnnnnnnnnnnnnnnnnnnnnnnnnnnnnnnnnnnnnnnnnnnnnnnnnnnnnnnnnnnnnnnnnnnnnnnnnnnnnnnnnnnnnnnnnnnnnnnnnnnnnnnnnnnnnnnnnnnnnnnnnnnnnnnnnnnnnnnnnnnnnnnnnnnnnnnnnnnnnnnnnnnnnnnnnnnnnnnnnnnnnnnnnnnnnnnnnnnnnnnnnnnnnnnnnnnnnnnnnnnnnnnnnnnnnnnnnnnnnnnnnnnnnnnnnnnnnnnnnnnnnnnnnnnnnnnnnnnnnnnnnnnnnnnnnnnnnnnnnnnnnnnnnnnnnnnnnnnnnnnnnnnnnnnnnnnnnnnnnnnnnnnnnnnnnnnnnnnnnnnnnnnnnnnnnnnnnnnnnnnnnnnnnnnnnnnnnnnnnnnnnnnnnnnnnnnnnnnnnnnnnnnnnnnnnnnnnnnnnnnnnnnnnnnnnnnnnnnnnnnnnnnnnnnnnnnnnnnnnnnnnnnnnnnnnnnnnnnnnnnnnnnnnnnnnnnnnnnnnnnnnnnnnnnnnnnnnnnnnnnnnnnnnnnnnnnnnnnnnnnnnnnnnnnnnnnnnnnnnnnnnnnnnnnnnnnnnnnnnnnnnnnnnnnnnnnnnnnnnnnnnnnnnnnnnnnnnnnnnnnnnnnnnnnnnnnnnnnnnnnnnnnnnnnnnnnnnnnnnnnnnnnnnnnnnnnnnnnnnnnnnnnnnnnnnnnnnnnnnnnnnnnnnnnnnnnnnnnnnnnnnnnnnnnnnnnnnnnnnnnnnnnnnnnnnnnnnnnnnnnnnnnnnnnnnnnnnnnnnnnnnnnnnnnnnnnnnnnnnnnnnnnnnnnnnnnnnnnnnnnnnnnnnnnnnnnnnnnnnnnnnnnnnnnnnnnnnnnnnnnnnnnnnnnnnnnnnnnnnnnnnnnnnnnnnnnnnnnnnnnnnnnnnnnnnnnnnnnnnnnnnnnnnnnnnnnnnnnnnnnnnnnnnnnnnnnnnnnnnnnnnnnnnnnnnnnnnnnnnnnnnnnnnnnnnnnnnnnnnnnnnnnnnnnnnnnnnnnnnnnnnnnnnnnnnnnnnnnnnnnnnnnnnnnnnnnnnnnnnnnnnnnnnnnnnnnnnnnnnnnnnnnnnnnnnnnnnnnnnnnnnnnnnnnnnnnnnnnnnnnnnnnnnnnnnnnnnnnnnnnnnnnnnnnnnnnnnnnnnnnnnnnnnnnnnnnnnnnnnnnnnnnnnnnnnnnnnnnnnnnnnnnnnnnnnnnnnnnnnnnnnnnnnnnnnnnnnnnnnnnnnnnnnnnnnnnnnnnnnnnnnnnnnnnnnnnnnnnnnnnnnnnnnnnnnnnnnnnnnnnnnnnnnnnnnnnnnnnnnnnnnnnnnnnnnnnnnnnnnnnnnnnnnnnnnnnnnnnnnnnnnnnnnnnnnnnnnnnnnnnnnnnnnnnnnnnnnnnnnnnnnnnnnnnnnnnnnnnnnnnnnnnnnnnnnnnnnnnnnnnnnnnnnnnnnnnnnnnnnnnnnnnnnnnnnnnnnnnnnnnnnnnnnnnnnnnnnnnnnnnnnnnnnnnnnnnnnnnnnnnnnnnnnnnnnnnnnnnnnnnnnnnnnnnnnnnnnnnnnnnnnnnnnnnnnnnnnnnnnnnnnnnnnnnnnnnnnnnnnnnnnnnnnnnnnnnnnnnnnnnnnnnnnnnnnnnnnnnnnnnnnnnnnnnnnnnnnnnnnnnnnnnnnnnnnnnnnnnnnnnnnnnnnnnnnnnnnnnnnnnnnnnnnnnnnnnnnnnnnnnnnnnnnnnnnnnnnnnnnnnnnnnnnnnnnnnnnnnnnnnnnnnnnnnnnnnnnnnnnnnnnnnnnnnnnnnnnnnnnnnnnnnnnnnnnnnnnnnnnnnnnnnnnnnnnnnnnnnnnnnnnnnnnnnnnnnnnnnnnnnnnnnnnnnnnnnnnnnnnnnnnnnnnnnnnnnnnnnnnnnnnnnnnnnnnnnnnnnnnnnnnnnnnnnnnnnnnnnnnnnnnnnnnnnnnnnnnnnnnnnnnnnnnnnnnnnnnnnnnnnnnnnnnnnnnnnnnnnnnnnnnnnnnnnnnnnnnnnnnnnnnnnnnnnnnnnnnnnnnnnnnnnnnnnnnnnnnnnnnnnnnnnnnnnnnnnnnnnnnnnnnnnnnnnnnnnnnnnnnnnnnnnnnnnnnnnnnnnnnnnnnnnnnnnnnnnnnnnnnnnnnnnnnnnnnnnnnnnnnnnnnnnnnnnnnnnnnnnnnnnnnnnnnnnnnnnnnnnnnnnnnnnnnnnnnnnnnnnnnnnnnnnnnnnnnnnnnnnnnnnnnnnnnnnnnnnnnnnnnnnnnnnnnnnnnnnnnnnnnnnnnnnnnnnnnnnnnnnnnnnnnnnnnnnnnnnnnnnnnnnnnnnnnnnnnnnnnnnnnnnnnnnnnnnnnnnnnnnnnnnnnnnnnnnnnnnnnnnnnnnnnnnnnnnnnnnnnnnnnnnnnnnnnnnnnnnnnnnnnnnnnnnnnnnnnnnnnnnnnnnnnnnnnnnnnnnnnnnnnnnnnnnnnnnnnnnnnnnnnnnnnnnnnnnnnnnnnnnnnnnnnnnnnnnnnnnnnnnnnnnnnnnnnnnnnnnnnnnnnnnnnnnnnnnnnnnnnnnnnnnnnnnnnnnnnnnnnnnnnnnnnnnnnnnnnnnnnnnnnnnnnnnnnnnnnnnnnnnnnnnnnnnnnnnnnnnnnnnnnnnnnnnnnnnnnnnnnnnnnnnnnnnnnnnnnnnnnnnnnnnnnnnnnnnnnnnnnnnnnnnnnnnnnnnnnnnnnnnnnnnnnnnnnnnnnnnnnnnnnnnnnnnnnnnnnnnnnnnnnnnnnnnnnnnnnnnnnnnnnnnnnnnnnnnnnnnnnnnnnnnnnnnnnnnnnnnnnnnnnnnnnnnnnnnnnnnnnnnnnnnnnnnnnnnnnnnnnnnnnnnnnnnnnnnnnnnnnnnnnnnnnnnnnnnnnnnnnnnnnnnnnnnnnnnnnnnnnnnnnnnnnnnnnnnnnnnnnnnnnnnnnnnnnnnnnnnnnnnnnnnnnnnnnnnnnnnnnnnnnnnnnnnnnnnnnnnnnnnnnnnnnnnnnnnnnnnnnnnnnnnnnnnnnnnnnnnnnnnnnnnnnnnnnnnnnnnnnnnnnnnnnnnnnnnnnnnnnnnnnnnnnnnnnnnnnnnnnnnnnnnnnnnnnnnnnnnnnnnnnnnnnnnnnnnnnnnnnnnnnnnnnnnnnnnnnnnnnnnnnnnnnnnnnnnnnnnnnnnnnnnnnnnnnnnnnnnnnnnnnnnnnnnnnnnnnnnnnnnnnnnnnnnnnnnnnnnnnnnnnnnnnnnnnnnnnnnnnnnnnnnnnnnnnnnnnnnnnnnnnnnnnnnnnnnnnnnnnnnnnnnnnnnnnnnnnnnnnnnnnnnnnnnnnnnnnnnnnnnnnnnnnnnnnnnnnnnnnnnnnnnnnnnnnnnnnnnnnnnnnnnnnnnnnnnnnnnnnnnnnnnnnnnnnnnnnnnnnnnnnnnnnnnnnnnnnnnnnnnnnnnnnnnnnnnnnnnnnnnnnnnnnnnnnnnnnnnnnnnnnnnnnnnnnnnnnnnnnnnnnnnnnnnnnnnnnnnnnnnnnnnnnnnnnnnnnnnnnnnnnnnnnnnnnnnnnnnnnnnnnnnnnnnnnnnnnnnnnnnnnnnnnnnnnnnnnntgtgtatgtttgtatgcatatatgtgtgtgtgtgtgtatatatatgtgtgtgcatgtgcatatatgtatatatgtgtatgtatccatatatgtatatatgtgtgtgtgacatatgtgcacatgcatgtacagatgcatgtgttcatatatttgcttttggatgccaaggagctcatcaagtgtcctgctttataacttttacttaatgtctctctctctctctctctccctctctctctctctctctctccctctctccctctctctctccctctctccctccctctctcccttccccctctctccctctcttcctctctttggatctatagctgttccagtggtcgagcacaagtgagccctagtaatactagtgtttacaccccgcaaggctctttgatgtgtgctgtggacttgaactggggtccttataattatgccacaagcactcttatcctctgagccatctcgacaaccactaaggtagggccttaagataatgtcctgtgaccttgaagagtcacaagaaagtcactatttttatttgtgtgtattatgagtgtactgcatgagtttattgcaccatatatgtatgcatgtctgcagaggacagaagagggtgccacatctcccggtactggaattgcatgtggttatgaactgtgtgatacaggatcctgagaacaaactctagttcctctgaagaaacaatgcttccaactgttgaatcagctctgcagcccagcaatcatcattcttcatgataaaatgttagaataataacaattcctgtgcaaggaaggaagacacacacacacacacactgtcactcagacattcaacattagaggccccagctagtctggcagagctttaaaaagaaatgcgctcataaggtttgagtgatggaagtgtgactgtcgttactcatgcttaacacaactgtatatgccaagacccagtagaacgtaggggcaaagtatttcatgacaccatggagatttgctgggtgggtgattatattgatgctaaacaatgattgcccttcctacatggcagcaaaataatctaaaaaataatcttaaacagtatgccatctgcagcacaacaatatgtttaagagacttagggatagtctaatgatgttcaaaacacacaccacacaaacacacacacaagcaacagaagaagataagcatgccacacacacccacacacccatacacacacacacacacacaccaaaagataaacacacacacccccaaaagataaacacacaccacaaaccatacacacaccagaagaagataagcacacacacacacacacacacacacacacacacacacacacacacaccccagaagaggataataaagatgatatatgcttagatgcccagcatttgacagtagaggcaggggggtcactaactcaatgccatcctcagtcacacagtgagttgaggccttttgggactacatgacactctgtctcaaaaaggaaaacaacgatcaagcaaaaaacagagaattaagagaagctgaaattagaggaaagcaagcccgtgtccatgaacaggaagccagtagttatgacagttcccccaaatagttcatagattgtgatgaggttttgaaacttcctgctctgattagcttttgataacttgccagaaactagagtcacctgtgaaaaggtaactctgctgttgaggaactgacttcataagacacacagataggcaagtctagtggggaattttctccatcaataattgatgtgaaaggacccagctcattgtgggtggttctgggcaggtgtcctgtgtataagaaagcaaactaagaaaactgtgggtagaaagccaggacgcattattctttcatggtctctgctttagttcctgcctccaggttcctattgtgagtttctgccctaacttacaccaggggatgaagtgtgacctaaaagttgtaaaatgaagtaaaacacattttgtactaagatggtttgggtcagtgttttattacattaccagagaagcaaattaaggcagaaattggtatcaggagtggggttgtgttgtgacggacctacccgtgtggtttgtatttcttggaacatcttatgggaggaaagtgaaaatttttggagatttggaggaaagtcattgtgcacacaaagcttagtgagctgttatgactctttaggaaagtatttcctcctggacagcacacaagaacccatagttaagagggtttgcatttcttaaagagactagaacttttgaagtatttggttttttaagactacaggacctttaatgttatactgtgctttatcatgatattatcacaagatcctggga

SEQ ID NO: 278 - DNA, 1425 bp, Mus musculus
gagaagacgtgtgagggccaggcagctcaaagcctgaaggaggtacttcaaggagggtccagagaagctgggcagggcgggacctcctcaaaggctgcccccggggacaccccaagcttcaggaagctctcagatgcacataggaggaagtgagaggtgaactcggcctggatctggttgggcaaggcccccatccatctgcttttctgactacccacagccatggccctggcccagcagctgcgatcagagagcgactttgagcagcttccagacgatgtggccgtctcagccaacatcgctgacatcgaggagaagagaggcttcaccagccactttgtttttgtcatcgaggtcaaaacaaaaggagggtccaagtatctcatctaccgccgctatcgccagttctacgccctgcagagcaagctggaggagcggtttgggccagagagcaagaacagccctttcacctgcaacctgcccacattgccagccaaagtctacatgggcgcaaaacaagagatcgctgagactcggatcccggccctcaatgcctacatgaagaacctcctgagcctgccggtctgcgtgctgatggaccccgacgtcaggatcttcttctatcagtctgcatacgatgctgagcaggtgccccaggcactccgcaggctccgaccgcgcacgcgcaaaatcaagggtgtgtctccacaaggggccatcatggatcgcatggaagcgccaagagcagaggccttgtttgacttcactgggaacagcaaattggagctaagtttcaaagctggagatgtgatcttccttctcagtaagatcaacaaagactggctggagggcacctcccagggagccacaggcatcttcccagggtccttcgtgaagatccttaaggactttcccgaggacgaggacaccaccaactggctacgatgctacttctatgaagacacaggcaaaaccatcaaggacattgcggtggaggaggacctcagcagcacgcccctgttcaaagacctgctagcgctcatgaggcgtgagttccagagagaagacatcgcccttagctaccaggatgctgagggggacttggttaggctgctgtcagatgaggatgtgggactcatggtgaagcaagcccgaggcctcccttcccagaagcgcctcttcccctggaagctgcatgtcacacagaaggacaactacagtgtctacaacactgtcccctgagtcacagggaccctgtggcaaggacggggtgctcagcaaagggcctttactttccaagaacacggagaccttcagggagactgatgtaagatgcaaacctcctggcccagagtgcctactggacaggattctattaagtttttgacactctaccttttggattcaataaaccattctgtctct

SEQ ID NO: 279 - DNA, 1020 bp, Mus musculus
atggccctggcccagcagctgcgatcagagagcgactttgagcagcttccagacgatgtggccgtctcagccaacatcgctgacatcgaggagaagagaggcttcaccagccactttgtttttgtcatcgaggtcaaaacaaaaggagggtccaagtatctcatctaccgccgctatcgccagttctacgccctgcagagcaagctggaggagcggtttgggccagagagcaagaacagccctttcacctgcaacctgcccacattgccagccaaagtctacatgggcgcaaaacaagagatcgctgagactcggatcccggccctcaatgcctacatgaagaacctcctgagcctgccggtctgcgtgctgatggaccccgacgtcaggatcttcttctatcagtctgcatacgatgctgagcaggtgccccaggcactccgcaggctccgaccgcgcacgcgcaaaatcaagggtgtgtctccacaaggggccatcatggatcgcatggaagcgccaagagcagaggccttgtttgacttcactgggaacagcaaattggagctaagtttcaaagctggagatgtgatcttccttctcagtaagatcaacaaagactggctggagggcacctcccagggagccacaggcatcttcccagggtccttcgtgaagatccttaaggactttcccgaggacgaggacaccaccaactggctacgatgctacttctatgaagacacaggcaaaaccatcaaggacattgcggtggaggaggacctcagcagcacgcccctgttcaaagacctgctagcgctcatgaggcgtgagttccagagagaagacatcgcccttagctaccaggatgctgagggggacttggttaggctgctgtcagatgaggatgtgggactcatggtgaagcaagcccgaggcctcccttcccagaagcgcctcttcccctggaagctgcatgtcacacagaaggacaactacagtgtctacaacactgtcccctga

SEQ ID NO: 280 - DNA, 40304 bp, Homo sapiens
  misc_feature (14527)..(15049): "n" at position 14527 through 15049 can be any base.
atgaggagcgagagatgcttttatttcaatcacctgggtcctggcctcatccggcaagagggcaatgtccgagatcaaaagcccagtcctactgcaagtctacccacttgctttgtctccttcttcactctcggcctccatcctcccctctttttctccctcccttcctcccacaaacccttattggtcctgttttggacactggtgattcatagatgaatgggacatggttcttgcccccaaatgtgcccatgctatggaatcttcagcaggaagaggtgagaagtgaagacgctgacagaggctggaattaaagtgacagctctagctggggagggtgctgccccagccttccagggaagtctttgaccagttttgaatcttaggtgatgcaaagaatcaaatggatgaagaaaagccataaaatcatagagatgggaggaagacggggagaatgcatcaggagaggtcaagttgatgtacaggacaatgagcaggcagaggaagggaggaaggcatgtcctggggcccgggctggagggagggtgcgggtgggtgaggggcttcagagtgctgcagcgcagaggagggaggagagggctgtggaaaggggaggttgccattcctttgtagttaatatttggaggcacgactgatttttgaatatagtttcatgcagatgctggtcagcctggagccacacttttctgctggctgtagatttttccccttttgatgcctttaggaaaatcaaattccaacatgtctgtgctggataaactgcagctagaggagccctcctttcctggggcactttcaaaggcagtggcatcttagcagcatcaggaaccagaggtagaccctcagggaggaggcagccctcaggcagctgctctgcctcacccctcacccaggattcaccttcctgagctctttttaaccctctctgtgaactgtcgcaaggtagtctctttgctgttaactctggtgcagcgtccacacagacctgcttgcttttataaataaagttttattggaagatagtcatgcacattcaactatttattgtttatggctgcttttgtgctgtgacagcagaattcagcagttgtgacagagaccaactccctgcaaagcctaaactatttactatctggcgttttttagaaattatttttcagctgggtgcagtagctcacacctgcaatcccagcactttaggaggctgaagcaggtggatcacttgaggccagaagtttgagaccagcctgccaacatgttgaaacctcatctccactaaaaatacaaaaattagcggggcgtggtggcagatgtctgtaatcctagctactcaggaggctgaggtatgagaatggcttgaatccgggaggcagaggttgcagtgagctgagattgcaccactgcactccagcctaggtgacagagcgagactccaacttaaaaaaaaaaaaatgaaagaaagaaaatgaaaagaaagcatttgccaatccctgctccagtgtactgggtagggtacaggttcagctgctgtaacaagcatcaaagaatcagctgctaaaacacaatagaaatttctttctccctgaaaaatctgaacagaagcagggtcagagatccaagctgttttgttgcttaactgttctccatagctggcctctccagccagctggaaggggagatgggaaatggaagatacaccttctgtctttcacgacacagcctgatagcatgtccatggcctcccctcccattctattggccagcaactggtcacatggccacagggagctgcaaggtaggctgggaaatgttctctttagctgggtggccatgagtccagccacaactcagggactttatcactaaaggagaaaggacagagtggatcgtaggggatattagcagtctctgctacaccttatcaagaagaataaagacagagtgcacaggggaaggatttggcattccctgcagagtattagaaaaaaatttgtaacatgctcaaatgaagtaggtatcaataacggatataaaatacctccttcttccacttcctccctcaaatatttattaagccctcatttatattaggctctatttggatgcattttgcagataaataacctgaagctcggagtgcttgagggagatgtctgagagttcatagccaaagagtgagagctctttctgccttattgccttgcttcccttgggacaccctggggctgggagctgggccttgcagcctgctaggctggctaggtttggtgacacagaaagcaaatgaataatttttaaagtgagaattctataaaggagactgcttgaacagattctgttagactgaaaaggcagaaggagacaccgaggtcaccagagatagaaacttcaggaagcagccatcacccctgcggctgtgggaacggaaggaagagagcggggttacgctagcctggaagcttggaggaggagacttagacctgcggggaggagctgggactcagaactgcagacctctgaggagggggtggggtgagactggctctgggaatgtgaaaaaaactaaaacctagaatcaactgctgctgggccaacatggcttccagggcagggcagttgggtcccgcctgcaaagagaaagaagcaagcccctccttcctctcccatccttccggcctccctccagcgccccctcctggccaagggcagcggaaatcagccagcaaagcagaacaaacagggttttgagtcccagctcgggcaccacaaagcagagggtagaagaaaggtttggagctgggagaaaatcatttaataaccagccccaaggctatgactcatttagacccccagtctgtgcagacctggggccactgcctctgagccagtgcacaccgggtactctggagcctctgtcttctgatacatgggtcagggggaatgcaaaatgattcaaccactttggaaaacagtttccttctttttgtttgtttgtttgtttgtttgtttgtttgtttgtttgtttttagaccgagtctcgctctgtcgcccagggtggggtgcagtgacgcgatctcagcttgctgaaatctctcctgggttcaagggattctcctgcctcagcctcccgagtaattgggattacaggtgcccaccaccatgcgtggctaatttttgtatttttaatagagatggggcttcaccatgttggccaggctggtctcgaactcctgacctcaggtgattcacccacctcggcctcccaaagtgctgggattacaggcgtgagccaccacacccgacctggaaaacagttttcctataaagttaaatatgcatctaccatatgacccagcaactctctcttagatatttacccaagagaaatgaaggcacatgctcactcaaacatttatgcttgatgtttgtagcccctttgttttaacagccccaaactggaaaacaaaaaaaaaaccctaatgtttatgaacttgtgcatggaaaacaacttatgttatatccatacaataaaatactacttgacaataaaaagaatgaataccgatgtacatatcaacactcatgaatttcaaaagcgttatactatgtgaaaaaaaacaggcacaaaagatcacatactctgtggttttgtccgaaatttcagaaatggcaaaatactgtgatagaaagtggatcagtcattgccagggcctgggggtaggggaaggagattggctgcaaagtgtcctgagggatcttttgagataatggaaatgtcctatataatgattgtggtgctggttacacaactgtccaaacccatggaattgtatactttcagttggtaagttttactgtgtgtgaattgcaccttgataaagctgattttttaaaaattgaagtagaacgctgttagaagtggtgcttcctccccttgtttctaatgccaccctcttgcaagcccatatccaagtagtggaccaaggcatcttataaaaacataaattcaatcatatcactccttgtttaaaacacttgaatggtttctctttcctctttgaatgaaatcctgagaatcaccatgacttacaagcctatctgtcctgctcactgaccctgacatttggagggcctagagcaatgggacagaggcccatgtaccacgattctaaatatgtacagttaggaatcaagccaatcaactgctaaaaagtaagttctatccttctttgataaatgtaccttcatgataaactggaaggccaggttcaaatgtagagtttggagttctgtcccagaatgtaaggttaacgaaaggcagacgctagactatagcctactgccattgcctttccacccccggatccatctgaaacctccaggctacctgccaggccgctgtagacatttgtgtccataacctctggggaccgaagacagcactggagatggaatcagagaaactggatgtgaaacatgtatctcttggttttccccaaattgtacttgattctgtatgtgtgtacatgtttgagcatgggtatgcatgcacgtgtatatttgcatgtgtgtgcatgcatgtatgtgcatttctatatgcctgtgtgtacatgcatgtgtgtgcaggtgtacatgtacatgtgtatatgtatgtgtctctgtgtacatgcctatgtgtgcatgtgtatatgtacatgtgtatgtgtatatgtgcctgcgtgtgcatgtgtatatatgcctgtgtgtgcatgcatgtgtatgtgtttatacatgtttgtgcatgtgtatgtgtgcctgcgtgtgcatgtgtatatgtgcctgtgttgtgcatgtgtgtttatttatgtacctcaacagcagtgtgagctacctgagggcagcagttgtgctgaattcatctcaatatcctttctacctggtgcagagtgatactagatgaatgcttgtggagtgaataaatgaatgaatgagggccagtacagcagttattaagtgtgggtcttgaagccagactgatgtgaggtccaaatcttactctgccggtcattaagcaagccgctttggtttattttcctaatcccgtaaagcctgggtttccttatctcccggtggggataagaataccactattttatgggggttggtgtgaggattaggtaacaacaatcagagccaacatggaccaagccaggctgtgggccaggcactgtactaagggctttgcaaatgctagctctcgtgctcctcctggcaatttcacggtgtaggggtggttacacagtcaactctcagagtgacttggctgttaccgtatttatgatggtggagaggagattcaggattcttagcccctgggggaagcttcccctgagtgcagctcagattctggctgatagggctgtctggagaggttgtctgagccagcaggctgcgcgctctgcctggccagctgcaacttgactctcgacttggccgggtccttctagtgcggcttatagcattcaacctcctctaggtggcgctgcggagcggggactcggctgctgatcgcggcgccccctggcggtctgttcccgtcaacatttagattaagcgcagagccggttccgccagggaagtgcgcgtcccggtgcccccgcgtgatgagagcggatgacagattgcgggaaaaagttagaatgtaacgttagttgtatgacagagaggaccaagctgtgcagcagagggagacagaaaagggagggaccaagccacagcaaggaatgatcgtcaataacattaacgtctagaatttattgaccacctgctatgcgcgagccactgtcctaaacatctggtattcattcccttagttaacacacctctagtaagtgcgtgtctcaagaacagtgtctgtgtttcatttagggcctagcacacagtgggtgtctggcacatagtaggttctcaacacatttggaaatgaataatacaataatcctgcaatttttctctccaattaataatgtagaggcaaatattatctccatttagaaaactgaacaatggtcggagagtttgcacaactaatgcgtgacacagcgagggcacacgaggtttagacccagctcagccgtgtgccagggcttctcagagaagagaagaccctctgccttcagggagtttgctgtctaattggccacgtctacaccctccctgcctgggtggcatgccagggatggctatttatggctcagggaggaggtccagtgaagttcccctcataaattataaagggagacacatgtgggtcaagattggggaattcagtgtgtgagggatccccaggaatcttacactgtccaatcagggattttccttctcttaccctggagagtggctgatgtaggcagtggggatttgctgagtacctataatgagctctcaagggtatctcctggtcctgtagaagaggctcacctcctccctatcacagagttccagttcctatggctggagctctcagccccagccgctggctgctcaaaggagagtttcctcatgtccaaaatgggggctatggtttatcttgtataccccagcacctgcatgaggaaggactgaaaagtgctgtgcacttttgtgattcgcacatccagtccccattcaggctctggggatcccccaggcatggtcttggtgtattagactttttcctggagatgtgattatgaatgggcattagtaagtggtgttatgcagagatgcccttctctgaatggcctctggtatttgttttttgagttcttgagaacatatatattttttggtattccatggtctttatcattgtcaggctgtcactgaactgtcgcttgcatttggctgcccctggtaattttcttccttcccctaactcactgcttcaagttcttgagttggcaggaagagaggaccaggctccttttatatttcttctgtgaataaaatatgccagtgtcaatgcatagactttgagctatcaattctaaccattcaatggcttttctctttttttggtttattcacaggctgtgggatgtggaggttatcaaaaatcaggtctccataagtgagaggtcacttcaggcatttctttgcacttatccaaaaaagattccatccatacttgtttaatggaacgtgtgaagagcttggctcctcttccaggtcatccctctgcctcattctccccctgcagcaggagcagcaagagcccggttctggagtgggagtagaaggtacaggcattgctgcagcggcaggacaggagcccattgctgacagagtgcctggcctcaaattacactgtatcagagctcgggcataaaattggcagcagcgttctgtgtatgaggagacagagaaatacctgtattcagcagaaccacgggcagggacagaagaaaaggagagaaagaggggaggaggggaagagctggcccgtcgcgggctcttccctggacatctttgtcccccaggtgcagaggtggcttcccagtggctgagtcagggccacaggaggtttcttggggggttgggggggccggggtttggagggcaagccatgaaaatacctgggaaggtaaacttgagggcttaacccacctgaaacacacacatacagatatacacactgaaaacgattaaaaaaggaataagaaatgtccatgtgtctaggcacttttatacagttttctattaattcctactacaactccattaggcaagactgtttcacagattggtgaagaagaaaggttcaaaaaggacatgttatcttgcctgagttcacctattataaatgtacttgtgtttatactcatttgtcaccgactgcaacctaaacatctaaacacattctctcacagccacaatgccaccactatacacattatatggtcttttatagacacaacacaaatgcacttacacttgcctatgcgagctgtatgtgtttatacacaaatatgtgtttccaactataggcatatactacacacacagtttacacaatcacctacaaattctgtatcatgcttgcttgctaaaattgttttgccacttcctgtccttcctgaccaactgtaggccaatgtcctcctcttccctcagttatggctgtgtgcttgcacctgttggtacttacagacacctgcactaataaccctgctctctgtgtttcatttcatcctctagcctgggagccccgagacaccagcaactcatcagacttattgtttgtattatttctagttctttgggtgtgaattcttcatgatgtggaggctctgagctgtctttcacagctcacgatttgtagttttggtctgtgagttgacagagtaggccctgcagagtcactgactccaagctgtttttatataatgcctcagcttaggatttctgcaccacgtgggtagcttatatcggggccttacaccagtgcagagggcaggcttgaggctgatctggtacacacgtcccttgttccacccatggactgtgagaggacctcagctcctgccgtgactctaggctgatggctgagaaactctgttcccataatcagttctgacacccactttacactgagaactcagatttgactttctgctaacagcaggacctgtggcctgtacctagtcccagatttggcattaaaatctcagcccaacaatgcatatccaatcttggttttcccatgggctgttggccacgttcctctccccctggtatagattcctgacccctctctttgatcctacctaaaaattatgctttcttgttttttttagctgggacttgtatgtttaaagtagtttaaaacaactttctgctctgcatgtatgaatacgagtgtgtgagcgtgtgtagctggcagggagttactgggtgtggctgtgccaatgactcctgtggacctcttctcagagaagtcccttcagaatcaaatacccatacctgttaggagctgcagtcactgactggcagcgtttcattcattcactgaatattggttgagcacttgcaatgtgccaggcacgctgctagccaaggaggcagtcattaaacatacagataaacaaacaaatgtgagatgacaatagttatgagtgctctgcagtagacgtgcagggacctgtgagagaatgtagtagggagggccttaatttagggtgtgtggtcagggaaggcctcactaaagatgtagcttctaagctgagatgcaaaggaggcagtgaagagctttttccagcagagggaacaccatgagcataggccttggggcggacgtcttagaacattctagaaacggaaaggaggccagtgagaaaaagggagctcaggagcagaggctggggaaggctgcagggcctcaggggcattggaggcaggcagggcaaggactctgaactttatcctgagcacagggtgatggggcaggagagtttaagcagggagggtgaaactcactctgattggcagccctgtgaaagaggattggctgggcatggagatctaaggatgaggaaaggatatcccagagtgccagggcgcgcaaaccaaacttcacactctaggaagacagaggccagaggaaccaggagggcttcctggaggaggtggcatttactctgggcctaagagatcacaggaaaatggaggccagcattctaggcctggggaagagtttgggcaaaggcttggcagtaagagaataaaggtggggcttgatgggccagaggataagtgactcctcaaggtcacaagacaccctgatgactgggaccccatctctgatggagcaaggcttctgatacccaactgaggcttggcgccaaggactgacatcaaggaagtggattcctgcaaacctggcacccgagggtccacttcctcaatttctgtgcagctgggaggtgaggtaagaggaagtgtgggccacaggctaggcccagagagcctggaggaggagcctctgccagactggagagaagcaggcctgagcctccccaaaggcagctcctggggactcccaggaccacaggctgagacgagacgcagggtggctggaggaagtgagaggtgaactcagcctgggactggctgggcgagactctccacctgctccctgggaccatcgcccaccatggctgtggcccagcagctgcgggccgagaggtgagtgccggggtgtggccgcccccgggccttctcactgctcctcataggccttagggacaaaggccagtccttctgcagtccctgatcaacatgagaggctggggttgagtcagaacccaaatactcagaaatgcaacctctcagaactgctttaacgaaactttgagctgtggctcaccaccctcagacacaaatgagaacactgaggctccaagagtgggagtgacttgcccacggtcacacaacgagtgaccggcagtgtctggagaggaatgcaggtgtcctgggtcccaggctggggccctttgcttcacatggtgatcagcaatgactttccatcttctgcgcaaacagaattcacagaatctggcttgttcttccgctaatcagggcttgcctcaaatgtcacctcctccaagaagccttcctgacagcccctacctcattgctgtctgaccctttgccctatttcccttttctgcctggttcttatattacaggaataatattatatgctcatttattattttttcttgaacgttggctcccccatgagaagcaagctccacgaggctgtgtccgttttgatcgctgctgtatcactagaaggtagctcatccctattgagcaccaggaccaagggctcaataaatgttgctgaatgaatgaataaatgaatgaatgaatgggtggatctttgagacggaaaaggtcttagattcttctagtccaaccttgccattgtacagattggaaatctgaggcccagggaggataagagacttactcagggtcacagagagtgactggcaaggttggggcttggagcacggcctcaccagcatctagcctcgtcgcttgggaagcattttcagaatttttcctcagtagccaggtctgagctctaagctgcgggggccctgaggacgcaaagcctggcccctgcaccccctggattggaacagcaggtgacctctgttacctacgtggaggccactcagggggtcaccagagacaggccaggctggtgtgtgcctacgcggggaacagaaggcccatgttggggcctggggctggaagtagaacctgaagcgtgggttggggcaagggcagcagaagcaaatgcctacaggggagtccacgtggccttcctgagcctcagagcggggtgcaggagctgggtaaggctggccgacctgaattccttcctcccctcacatgctcctgggggacccagccgcacgcaaactcgaatcttccggaagcagcagctgtttgaggcttgggcacttcctgctttctggggtacagggttcaggggatgacacggagagctgaccagcaggactgtgcactccctcccccactccctgtcccctttcagctgccttagccctcagagggggagggactgcttttcatgaggccttgagccaggtactaggggcatgggggctccctgtacctcgaaggtcttatctgaaagcgagcctggattgttctgcttaaggtcaaagcagagagtacaaggagagggcgcaggttcgcgcagcggggactttctagaaccccaaggtgagacatccaaagatggggagggctgccttaggggtggcaagttcggttccaacagacatgttttgagcacctactatgtgccaggtgccagaaaacctgccctggctgccctccaagggttcttccaacctcggcctcccccagggcaggctccaaaacctcccccaggccaggctccaaagtctgtgaactgtgcgagtgtgtcttgagccagaacatcccggcccagtagggcctgggtgaggtccccaagggagcggatattccaggggacttccggttgggtttgctgctcttcttgcccgccccacaggcagccaggccattctcatgctgcccatcaaaaaactctataattgcagacgacggtagtggccgtgtattgagcagtactgagcacctactgtatgccgggctctgttctgggcactgggatgtagggtgagcagagtccttgccctcatggagattttagggctgtgtttgttacagatgggactgcatgaccacccggagacataagtacttctgcctgtccccattttacagaggagggaaggagcggagcacagctaggaatcttcccaagggagcttgatcttcttgtccccagtgctgcgcctatgcctcgagcatctgccaatgtctgtcctgcttgactccttcctcagcccccaccaccccagggaaaactcgaggtccctctgcgaggcatcaaggcacctcgtgagcgggccctgcctgtctctccgactggtctctcatcacgttccacctcccgctctgtgctccagccatgctcagcaacctgcggttccctgaactgagcagctgtggcctttgcacttgccgctccccctgcctgaaatgcctttgctgccgtcctgcaaccaactcctctttgctcttcccggctgatcactggtgctgctgcttctgggaagccctccttgaccaccctcagcccaaggatgccctctgacggcgcatgagcctccacagtacaagctcctgctcccaatctctcctgtctgctgcatgattgattatttgagggaatataataatggccaggctcctgttctagttcaaaatgccacgtgcttttccttcccagcactatgcccatttgaattatgtcattatttgtttagtgtccagtgtccccttcccttctccttggagctgtgagatctgagaagcccatatgtcttaatgggcttagaacagtgtctggcccacaggcagtgccacatacaggttcgctaaaattataattattttagacggagacacaggctgagaagggctgggaattttttaagttcacacagcaagttgccgggaggctcagagtgcagggcagtatggcagtgtttggtgacaaatttctggagccagactgctactgcttgggctcaaatcccagcttcccgacttactctggctaattttactgtgcctcagtctcccgatctgtacaaaggtgacactgtcttagaagagcacctggcaccctcaggaaacaggcagctgccattcttattacccaacctgcctgccgccctgctcagggccgtttctaccctttaggttccttcctgtgtgccccccacccccaccttcccacctgatcgtactgcagaggaaattacctaggacaagcacagcctcaggggagaaagtggaggaggaagcttctcccaagggtatcaccacaggggcatgtgtggaaagtgagtggggctgggaggggggatttccactacctgcccactgctatcctgagtcacctccatgtggcagccccctgaattctgatgcagcctcagattctaggtcatgtgggtccggcgtggactgggactactgtgtgtagactccggaggtcccagccagctctggggccttggacttggcagcccttgcaatcccccaaccaccgccacccccccacccccgccactgtttcccctgtttcccaattgccgcaccagaagaatcatagttgcttcttgtttccttgtctgtctccaagtggctggactcagtgaccactcagagactcctggctgtgccttctcctgctccttggaagtctgtttcttcttcccctatctgtccctctcagacccctcctctgttccctgataggtcttcactgagtcaagagcgggggtcttagccacaagccacaggcagaaggttattcctgcctcaccacttttagtcgagacctcgagacccccatgctgagatcctgagctataaagcaggcctctcaaattagcatgccccaaactgagtccatcaactctgccccgtgtccccatcctggccagaagtgtgggtgtcactcttgacagtgccttttctttcacctccacatccaaacagtgcccaacctctcctgatcatgacttaggaacaacaagaaattggtaatgtgtctgttggaaatgcattaggctgcagggaatggaggaactgaccatggcttaaacaaacaggggattatttggtcacctaacaagaagtccactttgggaggctgaggtaggtggatcacttgaggtcaggagtttgagaccagcctggccaacatggtgcaaccctgtctgtactaaaaatacaaaaatcatctgggtgtggtggcttgtgcctgtaatccaagctacgtgggagactgaggcaggagaatcacttgaacctgggaggcggnnnnnnnnnnnnnnnnnnnnnnnnnnnnnnnnnnnnnnnnnnnnnnnnnnnnnnnnnnnnnnnnnnnnnnnnnnnnnnnnnnnnnnnnnnnnnnnnnnnnnnnnnnnnnnnnnnnnnnnnnnnnnnnnnnnnnnnnnnnnnnnnnnnnnnnnnnnnnnnnnnnnnnnnnnnnnnnnnnnnnnnnnnnnnnnnnnnnnnnnnnnnnnnnnnnnnnnnnnnnnnnnnnnnnnnnnnnnnnnnnnnnnnnnnnnnnnnnnnnnnnnnnnnnnnnnnnnnnnnnnnnnnnnnnnnnnnnnnnnnnnnnnnnnnnnnnnnnnnnnnnnnnnnnnnnnnnnnnnnnnnnnnnnnnnnnnnnnnnnnnnnnnnnnnnnnnnnnnnnnnnnnnnnnnnnnnnnnnnnnnnnnnnnnnnnnnnnnnnnnnnnnnnnnnnnnnnnnnnnnnnnnnnnnnnnnnnnnnnnnnnnnnnnnnnnnnnnnnnnnnnnnnnnnnnnnnnnnnnnnnnnnnnnnnnnnnnnnnnnnnnnatgtttggctcagacccgtcatgatctatcaccttggggctaggcacatggccactctgaacaaaaccagtgcttggttagccaggaagaagcagaggatacagtaaatgctcacagtgtccaccaaggttggtggcccttgtgtctatctcctcctgtccctgctgtctggctcacatgcacacaatctcttaatcagaccacttcaggacctcccagtggtgctctctcccctaagtctccacccattctttcctccccacacacctgcctgagctggcccctaaagccaaaattgtatttatgttttactttctttctttctttctttttttttttttgagatggagtcttgctctgtcccccaggctagagtgcagtggcatgatcttggctcactgcaacctccgcctcctgggttcaagcgattctcctgccttagcctcccaagtagctgggatgatgggtgtcatttttttatattgcctgcctcagcctcccaaagttctgggattacaggcatgagccaccattttactttcttccaaagtatgttttactttcttctgaagccctacatgactccccattgcctacataagttccctacttggcccttgggaccctcagactggcctcacctgcccactcagtctcagatcacactggccccagccatacagatccgggcccactccgcaggtcatgctgctcccactgcctggaagaccctccccaatttctacctggcagatgcctattctaccctctagacctgctcacatgtcatctcctttttgaggatttccccaacctgggcacaattaggcagtctctctatgggggtcccatagcgctccatccagggcacatgttgactttgtttacatctgtgacccagggcctaggacagggcctggtatggagatgtttgatgccttattcccaggtgaatctgtgcaattgacagcaatgtgttagactataatttggctattgctatatggtcaccagcttcccattcctacactcaatatggccaccagcttcccattcctgcactcagtatggccgccagcttcccattcctgcactcaaggcctgggctgtgtcttgttatctccgtattcccagggtcagtggctggacctggcctgggaaggggtgctgagagacgaatgttggcttcacaacattagtttgctttgcactctacctcatacccggtgggcccacaaaacacatcagggtgataagcaggatctcttttcccctccttcgcacagtgactttgaacagcttccggatgatgttgccatctcggccaacattgctgacatcgaggagaagagaggcttcaccagccactttgtaagacagactcctagtccttcacccaacaacctctgaacttccacccagctgacctctgaaccttgccctctgacctctgaacctccaattctctgatctcttaacttctatctcagtggttctcaacaggaccgattttgcccatttgacattaccctgggagattctgattattgcatcttggggcaggtctactccacatctagtgggtagaatccagggtgctgctaaacaccccactgtgcacatgacagccctgtccccagtaaagaactgtccggccccagcataatactaagattgagaaatcctgatcgcgtcctttgacctcagaacctccacctggagagtcgggggtgagggactttagtgttgcccccacaacacccctgtcatattcagacacagatggagggggcatcctgcgcccacagcacagccaggggcaggttcactctgcaccatgacctccaaggcatggctcctcatttcttgggcctgaatgtgtgtttggcctatttccaagggctcttgcctctaacactaggtctcacttcctctctttttccagttttttttttcttttcttttctttttttttcgcaaagctcgtctgcttctggggcgccagccttttgacttgacaggggtctccttctccagagacccttctgcatccttatcctcatcatcttcctcctcctcctcctccccttttcccttccacctctttttggcttgtgctcctggcccctgagccctccccacaacctctgtcctccttaggttttcgtcatcgaggtgaagacaaaaggaggatccaagtacctcatctaccgccgctaccgccagttccatgctttgcagagcaagctggaggagcgcttcgggccagacagcaagagcagtgccctggcctgtaccctgcccacactcccaggtaggcggccactcccgtcctgctgctgcagagctgctgactctccttccttccagggcccctgacactgttctgtgatttgatctcaaccccagtgaaaactgttcatgtagtttatagcccccactcccggcagttacaggctgccaagccctccctgcatggctccccctgcctcacgccatggcttccaccccaagcactctagcctcacagccccggagctctgatgaccatcgtggccactcgctcctgctgtccactaccaggaggccacagtctggagcacttcagcacctggcctcccttcctcagagacaggaatcccccagtctggtccctaaacacactgactcacctccctgcccaccctcagcttcctcccacgagaccagccctctgacttcatggtcttggcttccagcgtccctgtggctctccttcttctcctgtcccgccaggaagctgggtggcctcaagcctctgcttgcaaacagtctccccgccccctggcctcctggtccttcctccccagctggatcctaacgcgcaccttggacagcgccaagcccttagctgctcagcacctgccccgcaggaggaaaccccatcacgaatgggttacacgggggtggtctcagcggcgcccttcgtgccctgcaagttagagacagggacaattgtctcccttccccaagcctcagggacccttccccaagctccaaccccatctccagtttgttttttctgtctctgtttctgtctctctctgtctcagcatatgaccccgctccttctcatccagccccaccaaggaacttgaagctccccctaggagtcttgcctactctaagccagcctcccctctcaggctccatcattttccctcctctctcttttggggctctctcctgacaatctacccctccttttccttgtatattcatcttcctcttgatataccaactccctctgctaagcgtctccacagcctcaaccctcttctgtctttaaacaatcctgagccatgaaacagcattcttacaagcctccctgagcctccgtgcccccagggcccccaaagttctctttcttcttcctttggcatcaaattcacgcactgtctcaccttggcatggccatcctctccttaactcctcagcttggtttagctctgactactccactgaaattcctctcggtgaggtgggccatgacccatcaattctggcttccatggccagtgccaagcctcatcttcacacccccactccttcctctgttaagctttctccaacctcctgaggcaccagtgtctcccaatccccttcctagcttactagagactccttcagcttctctgttacagaatcaaccttctctgctgctccttggaaggtggggatcctctgagcagacatcctctctcccctgccttgtcttctcattccaaacactcaccctggcaaactgacccatgtctgggacttaattgtcacgtttttgctcctaactcccaatgtctagctctagcccagaccctcctaccgccgccgccatcacctctgtccatctcctggacaccaggagccaggcaggtttcagacttgcttcctcgtaggggttctcttggtgaatggttccaccagtgcgcccacatgaaggcacctggaggggacatttgtctcttggtagcccgtcatatttccttttcctccagaacatctgccttgagcttgaggaattgttcattcatccacttaacaaatgctcattcatctgggcatgattctagacccatggttcttaactttggtggtatgtggacgtgccttgagagatggaaagaatcctggttcctgagtcctgcccccggagattctgatttaattgctctggggcaagtgctacacagtgagatatttacaagctccttgggtagcttgaatgtgcagccggtgttgccactgtcctgggtgatgggggtacagctgtgagccaagcaggtgaaaatcctgctctcttagaactaagagtcgtgtgtgtgtgtgtgtgtgtgtgtgtgtgtgtgtgtgcgcttggatgaacaggcagtaaataaaaaagtaagacaagaaaaatatcagctggtgatagcacaactgagaggatgaaagttggatggtgccagagtggccacttcagtgctgtgaaaagataacagggaagaatgctgagccatcgggaaggggctctggccagggttcctggcctgtaggggcagccctgagccccggggccatgttgggccaggctcctaggacagctctttgtctcttctcagccaaagtctacgtgggtgtgaaacaggagatcgccgagatgcggatacctgccctcaacgcctacatgaaggtaccagtgggccttgccaccttggcacgtggaagggcatgcagtattggtgggggagcccacgtaccatccctgggtatggctttgggaactggggctggctctctggctctgatggccccatcttcaatccctaaaggcctggtctggggagtaaaacaggatgcgtccttagggttccagagataggagcaggagcaacggagaaggtaaaagagccacactaggaattgacaagtcttcatttaatgctccaagccccacaggtgaatgtctatgccaggagttaaaatacaaaggtgaattccatccagtgtctgcccccaaggtacccactgtcctatgggaatgccaacaggtggatcataagatcacacggagacatatgtgtgcctccatcatgggggtgtggccaagcaggccgcaggttgctcatatagcatctttgtgcaaactagagtaggcctcctctgggacaactcactcccttacgtgaacatgggctggattttagctacactcatgggtcttggctgggggcccttgtgtattctccgacttgcaaactctgcatctctatgagatgggagcgtagaggaaggagcatcttaaaggcagaggccaaggtggtcaggaaaggacttccaccagccacagccatccaggaaaggggcagtgttcctcatgaggtggcagtgagtgcaccgtcgctagagacctgatagtgacctcaggaagctggcaagcgaagccctcctcccagcccagcggcatcctcacagctggagagcgctgggctaggatcctttagtcttgactctgacactgactggctgggtgatttggggtgagttgcccatcctctctaggccttggttttcacacttgtgaaatggggcagtgccctctagtatcacaggagtgaagttgggatctgtcgagaacaggatgagaaagtgctttgtaaactgtgaacctgcttccagaatgtgagagatcttgactcctgatggagggaaggagcagatggagggcagaggaggtgggaggaaggaggagagagcaggtagctgcaggaatcctgggctctgagcagggaagagggagggaggggagctgggtgggctccagctgctccttcagggtggctgaggctccacccttctccccctgggctagaataggggagtgggctgtgaagggagggagggagggaaggaggaagagaaggcaggaggcgaggctggggaactggggctcctcattccacacctggtcttagcaaccagcagcccagaggatccatctctgcctctttgtgtccaattgggttcctggaagccagagatcattcagggcaggaatctctgccatggccaccccatcctgtgcttgcataccctcagagatggggagctcactaccactccgccctgacccaggctgcctgtcccattgttgggcagctatgagaaaagcccaactctctgtaagtcctacccactggtctcaccccgccctcatgaagaatgtgaatcacatgataatgacaactgcctggaactgcgtgaagagctttgactggcaaccaggagactcttgatacacgtttattgataaatgaataatcttatttaatcccctcaataacttgtgagttaagtgtgacagagcagttaggtaggtgggatgagatttgaattcacatctctgtgactccagggtttgagctcttacccactgtgcctcgttgtaatgaaaatcacagtaacaatgatgacatctaactttgatgggcacctggtatatgcctggtgttgttctaaggattctgcatgtatttactcatttaattctcacacaatcccacgagggagaggctattattgtccccattttattaatgaccatctggagccaggtttgcccaaagccacccagctggtgacaggcagagctgggattcgatcccaggagcccctggctccttaaacacctcccaggctgtccccatatgacagccttttccgggctctgcatccccagttcctctcggacaaagttccccgaccccacctcatcctgctgcccccatgggatcctctgcagggctctgggtgcctctggagcctcagcacccaaagccaaccctcagtgtccccagacctgtgcgcttggagtttggtgagatgaccccgccaggctctgggtgctcgcgtcctcacagcttcaaagtctttgcatcgtggtgggtgtaaccagcttggatgaaacaaggacactagggctcaagtccgggccctgtcacttagctcggctcctctgggccaggtactttccctctccaagcatcagtttcctcaactatgatatgagataaagtatcaggaagcattttgtaggctataatgccaccaactgttgttaatttgggttattttgggagccccccacccccgccaactgttgtctcaccttaagctttgggtagcctttagtggcagatggctctgggtgccccagctctgtcccttgctaggctttgtggccttgagcatatcccttcacctctctgatcctaactcaagggatgtcatgagatggagcaagggcgcgcatgtgatacccacctggtaaagtcaccgccgggtcatgttagttgtcatcaccattactgctgtttctggagaactttaagtcttttccaaatggactcttctcaagcccctggtccctctcctgaccttggacccaggagcagagcttgtgaagtgttaccttcagcatgctgagttttcttattcttttaaacaacgcatttctgttatcaggcatcatgcattagtaaagagaggagggctgatgtcagggctcggggacgggacatctaggctggggtgtccagatctttctgctgactaccccaccggttctgctgtctcacccacacagagcctgctcagcctgccggtctgggtgctgatggatgaggacgtccggatcttcttttaccagtcgccctatgactcagagcaggtgccccaggcactccgccggctccgcccgcgcacccggaaagtgtaagtgaccagcccctgggcttccacatggccagagccctgggtccctgctggaaaagcatctcttttccctgaaaggagagaaggaaaatacagatcagccatatccctggacactccaggatgatttgatttattagatgggtttagaaagtcatgttcaggcttggagggacagagggtgtgtgcctttcaatgtgataataaggattggaagacgaggactgggatattgactccagagagtttggtgccacagcaactactggggatagcccagaagctctgggtgcctggaaagaattgggggcagagaggagggaaaagctgccccatccacaaacattctctgagcatctctgggaatgccttctccctggtgtgttggagctccatggggccagctatggctctagttgtatcatgctggcctccagagcacactgttcctcccttattccaaaaagcccatccttcccaccaaaaattcaagccactcgtagactgctgggcttccaaagcccaggttgctgctactaagaattctgggaaaagcaggacggagctcctgagctccccaccagctcctccctctgcttcctcccaccaatgtctccaagggtcctctccatgcctggcatctcccctgtgcacacaggcaggtgtgtcttaattccagctgtgccatgtggcagccgcaggccccagagcaaggcacttcacctctccaaccttcagtttccctcagctgaaaaattagaaacagtcacatttacatcagagcttggttgtagggagcagaggaacaaacacatctgaacactttggcaagtgaaaggcaccgaatgagcgtgtatccccttccccacctgctttctgagcctggcttcctggtccataaagaagggagaacaatcccacctccaaagaggttgtgaggatttggggacaagtgtgcccgcccagaggagcaattgcagccacatttcagcatcttctgtctcctctgccttccctgctccttgcaaggggctcctctggacacaggagcaggaagctgggccctgagagaatcacagggctaacaagcccctcttctctctccacagcaagagcgtgtccccacagggcaacagcgttgaccgcatggcagctccgagagcagaggtaacccccgcccccacgctggccaggctctcacactgtgggcatctgccttggcccacctgccagccactgggcctctcctgctgggtgctgctgtgtgcctgggacagtgctgggcaccaggaggaaggaaggggttacagcctcagcctctgccactgggggtcccccgagcccagctaaggggagggcatgtgaccagcgtgcggagccagaggagaatgcttccatccctacgctcatccggacagtttacctgggcctcctctgagtcagccctgccttaggcatggaagctgcagagatgactcagacaaggcccagcccacgatgaagcctggggaccagggtgggtgctcagcccagagagttcgaacccttcccctgtgtgctcacccccaccaggtttggaaggagcacccatcctggagtcagggagacctgggttcaattcccagctcctccactaaaaaatggggtggcctcagagaagtcgcttattctccccaagcctcagtttctacatctgtaaaatgggagactaaagtatgtaaggcacttctataggaactcagtgagtgttctctccttccctccttactgcacgcttctcctcaggctctatttgacttcactggaaacagcaaactggagctgaatttcaaagctggagatgtgatcttcctcctcagtcggatcaacaaagactggctggaggtgagttcagaagtgaggatggaggtgagattgaaggtgaggttggagggaaattaaaagtgaagatagaggtgagggtggaagtgcaattggaggtgaggatgaaggtgagggtggaggtgagattggaggtgaggatggaggtaagagtggaggtgaggatggaggtgagattggaggtgaggatgaaggtgagattggaggtgagggtggaggtaagagtggagatgagattggaggtgaggatggaggtgagattggaggtaaggttggaggtgagattggaggtgaggttggaggtgagattggagatgagattggaggtgaggatggaggtgagggtggagatgagggtgaaggtgaggatggagattgagggtggagatgagggtgaaggtgaggatggaggtaagggtggacgtgaggatgggggtgagactggcagtaaggttggaggtgaggatggaggtgagattggaggtgagggtggaggtgagactggaggtgaggatggaggtgagattggaggtgagattggaggtgagggtggaggtaagggtggaggcgagagtggaggtgaggatggaggtgagactggaggtgagattggaggtgaggatggaggtgagattggaggtaaggttggaggtgaggatggaggtgagattggaggtgaggatggaggtgagcgtggaggtgagattggaggtaagattagaggtgaagatagaaatgagaatggaagtgggattggaggtgagtttagaggtaaagatggaggtgaggatagaggtgaggaaggtgagtttgcaggtaaggatggaggtaagattagaggtgaggatgggggtgagtttggagttgaggatgaaggtgaggttggaagtgaggttagagatgaggttggagatgaggttgggaataaggatggaggtgaggttggaggtgaggatggaggtgagaatgcaggtaaggttaggctgagattagaggtgaggctggaggtgaggttgcttcaggcattgtatgcttcagagactgaggatggtctcagaaggcctcagggaagagatgctatctgaggatagccctggagatccaggcaggttggggagcctgcgggaacaaagcctttggggaggcaggtgttcggtggcagcagaacattcttggagctcatgctttggttctgaccctgaaaaatgggttgcttagggcaagtaagttaacctactgagtttagtttcttggtctgtaatgggtgtctcagcaggggcactattgacattggggccagatggtcccttgtggggttgtcctgagcattgcaggctgttcagcaatatccctggcctctccactagatgccagcagcactgctaaattgcaccaatcacatggctctccagatatttgctcctgaggggtgaaatcgcaaccacttgtgtaatatgggacaacagtacataccttgcccacagcagtaaaagctgctgatgaagagtgtgaactcagagtcagcctgtttgggccatttcctagctctgtttttcactagctttgtggacctttggaaacttgctcaaacttgcggtttccttttctgtaaatgtttcttcatcggcttcctggaaagggtaaaggaggtggtagatggccagggctcgccccagagcctgggtgtgcggcgcctggccaggtactagggtcattaggagacttaaatgaaacttcaaagccagggactttcccagtcactgctttgtccctgtgtggcccacagaagggctgtgttctgactcagtgagtggaggtgggaagtggctgtgttgggccttggcctgggaccagccttttgtattaggtcctgtcttcagacttagtgctcctgtggggagtgttgaaggaggttctgggacaggcccagaggcagggtcagcccccaggggtcccaggacctttaagagttgggttgggtccctagcgtccaggccctggagaggagctagtagtgaccactggtttagccagtttagcagtttccattttaccctaatcatagatctccatctcaggaactcagggctcttacagaggcctgaggagtatctctgggccactttccagaaatagaaaacatgtattgccttcctgttttccggaaagtcctacttatcagtatgctggctaacttctggcctcaggttgaaggtgggggcagaggggcagggaggggaccactttgagccttggttaatatgtttgtaaaatggcatgtaaataatccatgttccatagggtcgttgtgaagatgaacagaacacgtgcccaaagcccaggccatggccgggtctgggtctgatttctggctacttggtctagagtagaggcacagttgtatctgatgaatgaatgagtgagtgagcgggatcagcagcaggcccttcctcacccctcatcctcttcctcccctgttctattttcctctgtaacacctgctgccatctgactcactggataggtcattgttcacagcgcgcacagcgtgtcattccccatcatactggaaactccgtgggggcaaggacttattattatttttttattattattttttctttgagacagagtttcactctggttgcccaggctggagtgcaatggcgtgatctcggctcactgcaacctccacctgccaggttcaagtgattctcctgcttccgcctcccgagtagctgggattacaggcccgcaccaacacgcttggctaatttgtatatgtttagtagagacagggtttcaccaagttggccaggctggtctcgaactactgatctcaagtgattcaccagcttcggcctcccaaagtgctaggattacaggtgtgagctactgcgcccggcccaaggacttttatctattttgagagcccagagcctgtcacgtggctggttctcaagaagcctttgttgaatgaataagtgaatgagtgagataaaagcagctttctatataaatccagattctggcatattgtaaaacccaaatataagccttcttagaagtgaccagctcagcgaacttcctcgctttccctcctccctctacagaagaagacccggacctcatctgcctttccccatcactagaacggggctgagggctctgaggcgtggctctgctgcctctcctctcaccagcatggcatcccttctcttcctctgcagggcactgtccggggagccacgggcatcttccctctctccttcgtgaagatcctcaaagacttccctgaggaggacgaccccaccaactggctgcgttgctactactacgaagacaccatcagcaccatcaagtctgtggcctgggagggaggggcctgtccagccttcctgccatccctacgaccaccgcccctcacatcaccttctcatgggtccctctcccactccaaagcccccagtggctcccagatgagccacaatgctgtaacaagccatcaacgtccagggtggcctggccagcctcattcccctttcccccaccccacaccccacttccagcctgatgcctccttactccagcctgtcacccccttagggacatcgcggtggaggaagatctcagcagcactcccctattgaaagacctgctggagctcacaaggtgaggggctgggaatggggctggggagttagatactctggagaagagagcgcagggagaaatgttaagcactagtattaaggtgctggggttttgcgtgtactttgtcttctctttttatccgcagcccagccctgcaggttaggcagcatctccccactttagagatgagcggggaagctgcagagaggttaggggaactggttgagctcacgcaggttgtgggtttagatccggatctgcagctggagctaaagtctctctggctaaaagccttggacttgaaccatccactctcagggactcactacccccccaggtccaggacattgctggacagttattttacagaatggtaaccgcattgctacatttctgactataaaacttgtaccaactcattatatattaaaaaagaaatgtcagtaaccatgtcagaaagatacaaagaagtgaaatcacctcatatttttactcccctcgttatgtgacgtacactcagatttcttcagtacttacaccccacacacacatgcacacacaaaagtcactttggctgcacaaaacctttcagtggctacatcattaacatggccatgcgcttttgctggcctcttaggatttcttctgcttttttactactctaaacaacattgtacagaccatcttagttaacctatttgatgacttatctgatcatttcctttgaatgattttcaagaagtggatttggggattaaagcatttgcaagtctcataggcttctggcccacactgtgaaattactggtagaaagctcagatcaatttctacgtacaccagccaagtagaaggatgcgcatcttcccgcacccaggccagacagttcctgtccttacaaggttctcctcaatagcctcacacaggtgtctctctgaggctttatacagccccactctgtgcccagtcaaacccactcttcttcacaactcttaatcctttagcacatttatacacgagacatttcaggctgtgccactaatttccgtgaaagtctcttctccttctcctttttttttttgagatggagtctcactctgttgcccaggctggagtgcagtggtgcaatctcagctcactgcaacctctgcctactgtgttcaagtgattctcctgcctcagcctcctgagtggctgggatcacaggtgcatactacctcgcccagctaatttttgtatttttagtagagacagggtttcaccatgttggccaggctggtcttgaactcctaacctcaggtaatctgcctgcctcggcctcccaaaatgctggaattataagcgtgagccaccgcacccagcctcttctcccttttaggcctcgatatccccatctgtacaatgggaggttagattacttggatgacacgggcttgtatcaggctctgactttttcttactcctggcttcaggacataaaacccttttcaccccctctccctacccctaccttacgcttaggccctttgattatccctgacttttcccatgcaggcgggagttccagagagaggacatagctctgaattaccgggacgctgagggggatctggttcggctgctgtcggatgaggacgtagcgctcatggtgcggcaggctcgtggcctcccctcccagaagcgcctcttcccctggaagctgcacatcacgcagaaggacaactacagggtctacaacacgatgccatgagctgacggtgtccctggagcagtgaggggacaccagcaaaaaccttcagctctcagaggagattgggaccaggaaaacctgggaggatgggcagacttcctgtctttgaggctaatggacccgtggggcttgtaatctgtctctttctactatttacatctgatttaaataaaccattccatctgaaaggggcaggctgcgggaaagagtgtctttcatggggagtaaaataccatttaatgagcatccacagggcgtcatttatatctggcaggggccctggctctgagacccctgtcctgccaccccatttccttgctctgtccctgtgttggggggaaacccgagggtccccaagccataccctttctccctcccactgctccccttttcctgggattggccacctgccccacagaagtgatctgctctgggtgccctctggggttccaccaatgccaagtcctcggctgtgtgatgagggtcagaagctctcctctgccttcctgtctctgctgctctgtggagcaggaaggcaggtctcggggttggttgtctccactgtaagtagacacagggggaggactctagtctcatccaggaggagggggacacaaagcaacgggatctccttctctgagctgaatctccttctatcctaatctaccaaaaattaaacaggtgtgactcccacaatggtggtgtgaggagcttggtggaccctctccccagggaaacagcagtttaactgatgagaaatacttaaaatcaactgtttaaagtctctggaaattgttctaagggcacagagcacatggagagacagtcgttcaagtagatcattacgtctcagtaagaacagtgagtcggtggcattggagacacatcgtgttcccgtccccccacccccagctccatgtgatggaaattccactccagatcctccactctggatggatgcagccaggaagatgggctccctcatccctcagctcctaaccttccacagtttcaccccaggaggaacaggctgccagaatctcttctctctgcagccctgtgttgtagaagcactattccaggtcattacagcagagaggactgagtttcctgcagttcccatacaaagtaccaggaaattgagcttaagcaacagaaatcgattgtctcacagttctgaatgctaggtgtccacagggccatgctccctgtgaaatatgtagggaaatccttccttgccttttcttagcttctggtggtttgccggcaatgtttggtgctccttagcttgttgatggatcactctgtcttcacatggcattctacctgtgtgtatttacagtgtcttccctctgtgcatgtctgtctctgcatccaaattcccccttgtataaggacacaagtcatattggactagggcccatcctagtgatcttcttttaccttgattacctctataaacctcctctttccaaataaggtcacattctggagtactaggggttaggacttcaacatgtcatttttaattccaacataacacttcaacccatgacactccctttacccactcagctccccctcctagggcaagggctctgcaataggcgtagcaggctaagaatgctgaaccttaaccctctggtagagcaggggttccatgctgagaggggcaatctgagatcaagggataccgtcctccactccagtgcccactcacagaacaggacatcactcctggagaagcaggctgatttccccatccccagctctgatgcagtggtgcagaggttctgcccagggagagagtcaggccttagggatggagaattccacagcttttcctgaggggactaactttatttgggaagcatgccgaagaagttggcaaaaataatggaaatcttggtggccggcaattaaggaggggctagatactaatgccatcaagagaaatgtaaggccagaaatttaacagagaaccagataaagaaataacgaagaatagtggttctaggactacagtcatccctgaggactcaaaagattgtgctctcgtgccaggctgcacccacacagcagaaatcagagtggaaagtgtggcagacttgaaatcattccctaaaccacatacagatccatcagcaaaacacgctagctcaagaggctgaagcataacctctgaccaagcaatggctgaacaataagctaatctgacacagaggggattcttaggaaggcaggcttaaaaataaaattacactcatttcctggtggtctggaagactgcgtgcacgcccaggccgatcactctcaggagtgactggagaaagaaacgctgggctatcagtttctgactgaacatggggcaagtttgaaccctgtactgtaaaagatgtcttcaaaccacattcacggccaaaagtaaggggtgaaaccaatctaattgagggggcttcagcacaacttttcaccaataggtggtttatgcagacccaggtgcaacctctaggaaaccaggataagagagaaaaaaaaaaaaaaaaacacaagaggaaaaaatacgagcgggggcatcataagctacacattgtaggggaaacggccctcacaaaattagttcagtgaagccactaaacaagtaaacagataacaaaccaaataacaaaaacattaagccctagagggaataggagagcagcatctagagttgcttcaaaatataatctaaaatgttcagttcctgatatggtttggatctgtgtccctgcccaaatctaatgtctaattataatccccaggttgaaagtggacccttatgggaggtggttggatcatgggggtggattctcataaatagtttagtgccattccctccgtgctgttcttgcgatggtgagtgagatctggccatttaaaagtatgtggcacctcctctttctctctctcttcccctgctcttgccatttaaaacttgcccgcttccccttcatcttccaccatcattgtaaggtttcctgaggcctcctcagaagcagaagccactaggcttcttgtatagcctgtagaaccaagagctaactaaacctcttttccttataaattatgcagtctcaggtgtttttttgtttttttgtttgttttttgttgttgttgttgttgttgttgttgttttgagactgagtcttgctcttgttgtccaggctggagtgcagtggcatgatctcggctcactgcaacctctgcctcccaggttcaagtgattcccctgcctcagcctcctgcgtagctgggattacaggcacccccaaccttgcccagctaatttttgtactttcagtagagatggggttttgccatgctggccaggctagtcgcgaactcctgacctcaggtgatccacctgcctcggcttcccagagtgctgagattacagtcatgaaccactgcacccagctggtatttctttatagcagtgcaagaacaggcaaatatagttcccaacaaaaaattataagaattgcaaagacacagcaaagtgtaatccatacacaggaggcaaataaaagcaggcaaaggaaactaaaaaaattgcctttgagggaaggattcagatgctggacttagcaaacaatgactttatattaggaatatgtttaaataactaaaggaaaccatgtttaaagaattaaaagaaagtattgtaacaatgactcttcaaatagagaatatcaatacaaagacataaataattttttaaaagagaaccaaattgaaattctagagttgaaaagaacaataactgaaatgaaaagtccactagaaaggctcagcagtagatttgagttggcaaaagaatgttagcagagaaagtataagcaaactgagagatagatcaatagagatgatgcaatcttaagaaagaaataaagaaaaaggagtgaagaaaaatgagcagagcatcagagaaatgtgggacccatgaagtgtaccaacatatgcataatgagattaccagaaagagaggagagaaggagacagaaaaaggatgaaaagaaataatgattggaaactttccaatttttattttttaaaaaaccaccaatctacatatccaaaaagctcaacaaactccaagtagtaaaatacaaagaaagccacacttaaacacatcatagtcaaaatgttgaaagccagacataaagagaaaatcttgaaagcagaaagagaaaaatgactcaccgcataaaagggaactacattaagactaacagctgatttcctgtcaaccaagaatcttacataaaacaaatctaccactcaaaaatgaaggtgaaattaaaacattccaaaataagcaaaaactgagaatattcattgttaagcagacttgccattacaaaaaaatattaaaggaagttcactctaatggcttcattttaacttgattagctctgtaaagactctattttttttttttttttttgagatggcgtttcactcttgttacccagactggagtgcaatggtgtgatctcagctcactgcaacctctgcctcctgggttccagcaattcccctgcctcagcctcctgagtagctgggattacaggcgtgcaccaccacgcctggttaattttgtatttttagtagagatggggtttctccatgttggtcaggctggtcttcaactcccgacctcaggtgatccacatgccccagcctcccaaagtgctgggattataggtgtgagccactgcacccagctaagactctatctcatgtaagatcactgcattctgagatactggggttagaaattcaacatatcttttgggggagaatacaatttgaaccacaacagtacactagaaaatatccatttaagaaaaattttaaaagaccttgcaaggtgtgatctcccaaacccagttatttggcttctagtttgttgcctgaccacattcaccaagaaaattttctgccacaaaacaaccagacctcagctaggacacaggctttgaggaattatgagcctcacaagaagcaaaggagttctccaatgattcttccactccccaccaaaaaaactatgataggagctgaaaccagaatacagagcagttggggtgttgttttctggagtgcagaggcagtccagaaggcagagccatggggaggccatgagatagggaggctgcgccaggggcttccgtgccaggccaaggccctagatgtgagagctgaggtgatctggagagagtggcattcctggcttcaagcagaagcggaagagggtctcctctggagtaaagtatttccagtttaggctggcaggagttaccctgattaatatcaagcaaaaggctcatagtcaaagatcaccaaatctctgtgagtgagaatgagcagaggcaataaacaatagctttagagccccagggactaccgattaccgaattatgtgactgaaatatttaaagaaataaagaatgtaaccataaagataaacaagcaaaaaagaatgagatggcaaattttcagatgtgtaaaagaaagaaggtatgaacgcatctatgtgtgtgcgtgtgtgtgtgtgtatacacacatatatattattcaatgggtgagttggtaaaaagtccaaatttatcaataattctgataccataaacatagatggattccatgcatgagttaaaagactgtcagggccgggcacagcggctcatgcctgtaaccccagcactttgggaggtagaggctggcagatcacgaggtcaggagtttgagaccagcctggccaatatggtgaaatgccgtctctactaaaaacactaaaaaattagccgggcgtggtggtgcacacctgtaatcccagctactcaggaggctgaggcaggggaatcgcttgaactcgggaggcggaggttacagtgagccgagatcgcaccactgcactccaacctaagcgagagagtgagactccgtcaaaaaaaaaaaaaaaagactgtcagattgaatttttaaaaatctaaatctatgtaagtgtcatatgtacaagagacacacataaggtaaaacgtcatggaaacattgaaattaaaaaaaaagtatgaaaaaagatattcctggaaaccactaaccagaagacagctgggacgtctatacagattcacaatctacttttgtgtaaacttggtactcaaactcacttggtagcactccttgaccctgagctgaatagttaacgcttaccagccatatgtgtctctgctattcccttattttttgatgcttttggggggatgaattttgattttatgtacagctcaagtaagaacccgtcaaaatcagaagtgaaaagcttttgctgataatgaagctgatgaaaattgcatgggtggatttgttaagtaacggtatctgatgaaaaccttggctctgatcaattggcagtgggcttcagtctgctctgcagaatggctgatgaggacccaccaattgcttacaccctgttgactgttcttggcgtaccatgtgctacaggaacacaccagatacatttgacagtaactggaaaaagcctacatccaccatctttgtaggatgtatccaatttaccgtctgtcagtacacatactagacaccatgagtaaccagagaaatattttctgactgattaataacatttttataccagcggtacaaactcattgcagggattctagcttggaaaaaacaattgttagatgttatcattcctaggaaactgctatgcatactccctccctaaacatcttgtggaaaagcagtttcagcttttatttccccttgggggatatgtgcattttagcctaagtgcaaagaagtttagaggaagggtaaacactttttttcaggctgtgctcttgctaccatcacagaacctaagattccatggctcccgaaagagtccagtgttaagaatgtcatgtacacaattgacagtgtttggaatgatgctgattatacattaacacatttgacacagattctgactatactgatgcttgcaaacaagtctgtacataaaggttttggagaatttttgtgacttatgagaaaatgatgatgtaagacttcattcttgcacaaaaagtttatcagctaaaagtggaaataactgagaaaaactgataccaaagaaatgtcaaacaccgtgattcagctattgttcattctttgcatagtggggaagttgctaacaaatacagataagggttactgtgatgataatgactacacaattaacacagagtaaaacattcccattaaaaatatggtgaatatttaattagttaattatgggccttgagcaattctcaattaatggtgagcaggagataatggaaaattacccaattagaaacaggcttctcaagtaggcatctcatggaataggatgctggaagaagtcattaaaaaggcaattgattgcagtgtgcttcttggtttggggaccctgttcctggtacatcatgagatgtccaggagggaatatctggcatcctcaagttaagataattcaaggtgtgtttaataaagggactgtttacaaagacgtagacaacacacaggaaaacctcaaggaatagttcaatatcccagggataggacctcagacctgttacattcctgagcccaaaggaataaagggaaggagtgtctacaaaacctggaaggaggggattgtgtagacatggcctccttagaaggactggtgatctttgactggtgggcgagattgacccaaagtaaccccgctgggaggcgatcagaggaacaaataccccgccctcctctccttccccattctgatctcaggggaggggttccctactgccaaacaaaactggaagccctagggccaggctgttgtaatccacacaggttagcttcccaaggtagacagcagggcggaagagagcacagtgtagatgtgagtggggaaaaatgaagatatctggcatcctccacccgttttgcccctcattatatacgcttatccttcagccaagtgaaaactccatgttcccaagacagggaacacaggaattcccatcagctattttggcattttaggatcatatccatacagacatactcccacctgaaacccaaagtgtgagctgctacgggtattctttatataaagcagtggaggcatgatgaatgaagtaatacacgcatggctgttagagcccctgcatccgcagctggtcacaggtccaaagctgatattttgagctacctgttcccagtgttcatttcatgttcctctttcctctgccagtacatgggtcaaataagggtctttatgtggtggagcaactcaagacttcattcctatgggatctgagttctcgttagacttgtctttatcagattgcctcagtattccattgaccaggactattgggtaagaaaatactgagaggcacctatgtgaatcacggtgggaccacacatagtcctgtctacctcctttcttttttcttttcttttcttttttttttcttttttttttttttttttttttttttgagatggagttttgctcttgttgcccaggcttgagtgcagtggcacaatttcagctcactgcaatctctgcctcccgggttcaagtgattcttctgcctcagcctcccaagtagctgggattacagacacccagcaccaagtccagctaattttttttttgttgtatttttagtggaaacggggtttcaccatgttggccaggctggtcttgaactcctgacctcagatgatccacctttctccacctctttctccacctattggctcagtggcacaaggagggtcaaatggttcaaatttctaaaaaatatcactttgtatatgccacaagttttcatatgccctattgtcatttgattgtaactactatttaaattcaattaggatattatctgagctatcagttacttagaagtgtgttttaaaatttttaaacatgtgaggattttattttttgtttgtttgtttttgggggtttttttgagttggagtcttgctctgtcgcctaggctggagtgcagtggcacaatctcggctcactgcaacttctgcctcccgcgttcaagcgattctcctgcctcagcctcccaagtagctgggattatagggatgcactaccacacccagctaatttttgtattttcagtggagatggggtttcaccatgttggtcaggctggtcttgaactcctgacctcaagtgatccacccacctcggcctcccaaactgctgggattacagttgtgaaccaccatgcttggccatgtgaggactttaaaaaaacacttttttttctttttctttttaaagtatccttgcacgttttgtgcagattcatttgtctttcatgtccttcagttttagagacctagacaagctaagggagtgaatcaaaatcaacagataacaagggtgaggtttctcaaactgaagcatcctgtttacgtctggtaaaaccacctccacagaacatcatgcgtcgtcaggtataaggcctaacacctgtggtgtgtagtgatacagcattttatctcttccttgtagcccatgaaataaagagaaagtttgttcaagagatgatggtagttttcactgcactagagtgttacaagaaagtaagtgagaacaataaccccaggacagggaggctgctgctcactgctccagcatctgcagcattctcctgaggggacacattaaggcagcagagagacatttcccaaaataaacagcgagggaaataaaggtgtaggagtcacagtgaggaggctaaagtgactccatcttggaagctaatccaccatgttgacttctgattaaccccggttctgggaatgccgctaagatttccattttatctattgttctttgtgtgagaacatatgcctaccataaatcctgcctttagatcaaattaagcgtgctaccctttctttatggtgtataatccctgggtctgggggataatagtgtagagatctacctgtctcacagctgcccaagaccatccttcagtccctaagttcccaaataaaaccatcctataacaagctggattcgtctgcttccttctttggtatcctggctcctatgtttgc

SEQ ID NO: 281 - DNA, 2692 bp, Homo sapiens
gaagcaggcctgagcctccccaaaggcagctcctggggactcccaggaccacaggctgagacgagacgcagggtggctggaggaagtgagaggtgaactcagcctgggactggctgggcgagactctccacctgctccctgggaccatcgcccaccatggctgtggcccagcagctgcgggccgagagtgactttgaacagcttccggatgatgttgccatctcggccaacattgctgacatcgaggagaagagaggcttcaccagccactttgttttcgtcatcgaggtgaagacaaaaggaggatccaagtacctcatctaccgccgctaccgccagttccatgctttgcagagcaagctggaggagcgcttcgggccagacagcaagagcagtgccctggcctgtaccctgcccacactcccagccaaagtctacgtgggtgtgaaacaggagatcgccgagatgcggatacctgccctcaacgcctacatgaagagcctgctcagcctgccggtctgggtgctgatggatgaggacgtccggatcttcttttaccagtcgccctatgactcagagcaggtgccccaggccatccgccggctccgcccgcgcacccggaaagtcaagagcgtgtccccacagggcaacagcgttgaccgcatggcagctccgagagcagaggctctatttgacttcactggaaacagcaaactggagctgaatttcaaagctggagatgtgatcttcctcctcagtcggatcaacaaagactggctggagggcactgtccggggagccacgggcatcttccctctctccttcgtgaagatcctcaaagacttccctgaggaggacgaccccaccaactggctgcgttgctactactacgaagacaccatcagcaccatcaaggacatcgcggtggaggaagatctcagcagcactcccctattgaaagacctgctggagctcacaaggcgggagttccagagagaggacatagctctgaattaccgggacgctgagggggatctggttcggctgctgtcggatgaggacgtagcgctcatggtgcggcaggctcgtggcctcccctcccagaagcgcctcttcccctggaagctgcacatcacgcagaaggacaactacagggtctacaacacgatgccatgagctgacggtgtccctggagcagtgaggggacaccagcaaaaaccttcagctctcagaggagattgggaccaggaaaacctgggaggatgggcagagaagcaggcctgagcctccccaaaggcagctcctggggactcccaggaccacaggctgagacgagacgcagggtggctggaggaagtgagaggtgaactcagcctgggactggctgggcgagactctccacctgctccctgggaccatcgcccaccatggctgtggcccagcagctgcgggccgagagtgactttgaacagcttccggatgatgttgccatctcggccaacattgctgacatcgaggagaagagaggcttcaccagccactttgttttcgtcatcgaggtgaagacaaaaggaggatccaagtacctcatctaccgccgctaccgccagttccatgctttgcagagcaagctggaggagcgcttcgggccagacagcaagagcagtgccctggcctgtaccctgcccacactcccagccaaagtctacgtgggtgtgaaacaggagatcgccgagatgcggatacctgccctcaacgcctacatgaagagcctgctcagcctgccggtctgggtgctgatggatgaggacgtccggatcttcttttaccagtcgccctatgactcagagcaggtgccccaggcactccgccggctccgcccgcgcacccggaaagtcaagagcgtgtccccacagggcaacagcgttgaccgcatggcagctccgagagcagaggctctatttgacttcactggaaacagcaaactggagctgaatttcaaagctggagatgtgatcttcctcctcagtcggatcaacaaagactggctggagggcactgtccggggagccacgggcatcttccctctctccttcgtgaagatcctcaaagacttccctgaggaggacgaccccaccaactggctgcgttgctactactacgaagacaccatcagcaccatcaagtctgtggcctgggagggaggggcctgtccagccttcctgccatccctacgaccaccgcccctcacatcaccttctcatgggtccctctcccactccaaagcccccagtggctcccagatgagccacaatgctgtaacaagccatcaacgtccagggtggcctggccagcctcattcccctttcccccaccccacaccccacttccagcctgatgcctccttactccagcctgtcacccccttagggacatcgcggtggaggaagatctcagcagcactcccctattgaaagacctgctggagctcacaaggcgggagttccagagagaggacatagctctgaattaccgggacgctgagggggatctggttcggctgctgtcggatgaggacgtagcgctcatggtgcggcaggctcgtggcctcccctcccagaagcgcctcttcccctggaagctgcacatcacgcagaaggacaactacagggtctacaacacgatgccatga

SEQ ID NO: 282 - DNA, 1020 bp, Homo sapiens
atggctgtggcccagcagctgcgggccgagagtgactttgaacagcttccggatgatgttgccatctcggccaacattgctgacatcgaggagaagagaggcttcaccagccactttgttttcgtcatcgaggtgaagacaaaaggaggatccaagtacctcatctaccgccgctaccgccagttccatgctttgcagagcaagctggaggagcgcttcgggccagacagcaagagcagtgccctggcctgtaccctgcccacactcccagccaaagtctacgtgggtgtgaaacaggagatcgccgagatgcggatacctgccctcaacgcctacatgaagagcctgctcagcctgccggtctgggtgctgatggatgaggacgtccggatcttcttttaccagtcgccctatgactcagagcaggtgccccaggccatccgccggctccgcccgcgcacccggaaagtcaagagcgtgtccccacagggcaacagcgttgaccgcatggcagctccgagagcagaggctctatttgacttcactggaaacagcaaactggagctgaatttcaaagctggagatgtgatcttcctcctcagtcggatcaacaaagactggctggagggcactgtccggggagccacgggcatcttccctctctccttcgtgaagatcctcaaagacttccctgaggaggacgaccccaccaactggctgcgttgctactactacgaagacaccatcagcaccatcaaggacatcgcggtggaggaagatctcagcagcactcccctattgaaagacctgctggagctcacaaggcgggagttccagagagaggacatagctctgaattaccgggacgctgagggggatctggttcggctgctgtcggatgaggacgtagcgctcatggtgcggcaggctcgtggcctcccctcccagaagcgcctcttcccctggaagctgcacatcacgcagaaggacaactacagggtctacaacacgatgccatga

SEQ ID NO: 283 - DNA, 33468 bp, Mus musculus
  misc_feature (1578)..(1778): "n" at positions 1578 through 1778 can be any base.
  misc_feature (2792)..(3115): "n" at positions 2792 through 3115 can be any base.
  misc_feature (9060)..(9290): "n" at positions 9060 through 9290 can be any base.
  misc_feature (14053)..(14178): "n" at positions 14053 through 14178 can be any base.
  misc_feature (17998)..(21098): "n" at positions 17998 through 21098 can be any base.
  misc_feature (27074)..(27502): "n" at positions 27074 through 27502 can be any base.
cctccaaatgccaccatactcagggctcaggtactcacattcatttcctagagaacagcgcggggcaggtccacacagcatctctggtttggatccttctccttcttcagatttatctgacaggtctctcagctgaagtgcccaggacagaagccctattctggggtccaaccatcccctctggttacattcatatatagttaagcaatactatgtctatgcctgccacattgctaaaaatgaacctgatatattatatgtatgtaatatatataatataataatataatatataattatatattaatataatataaaatttatactaatttatactaataaaatatgtaatttataatataataaatatataatgtataatagaatagaatatatatatcactttaaatttttatttactttttgtgtttgtgtgtggacacatgtgtacatgggtcagctccttccttctattttgtgagtcctgggcataaaactcaggtatagttcaggcctggcagcaagtgtcatctcgctagtcaggctagcattttgggtaccagataggagattctactactaccaagttccgaagactgtgtaatacatatttgcagtttgtccgcatcacatctgccctccacatcttctccttggtcacagctcatccctacccaccctggaggtccctgtagctgcttggccttttttcctgacttctgccccacccaccctggcctgttcctcatgtggccaccagagggcgggagcggaattcacatcctgcggtttttcattttatgtgtgggaaaaaaaaaatacaaagtagcgtcaagagtgtgtttctgggaccaggggctatgcatccggtgcgaatcatcccagcactactgcatccacagtgagacctccagctgaatccccactttcctttgcaggctaccctcatctccctttcccagtgagatgtctgtctgtttgtctcccagggagctctttgggaaagagatgttttgttggacaccgcacgagcttgttttaatatgttgcgggagccacataacatgttagctatgcaatgcacgtgggatttttttggcagtagaccaatcttctttcagggtccttcccctcctgccttctgaggctcctccctcccccctccccccccaaaccaggaaggaacacaaggcaggagagagcagagacctccagcggttggacagagtgagattgtgtacacaggcaaagccagtcagttccgggttcaatatgttcccgcccctcttgtgtgggcttccaggaagctggacggattgggactggggctgctgtaccccagcggggcccccaccccctttctggctgagtctggagtactagtgagaggtgagcaagggtgttagacctattttagagaagtaagcaggaagtagggacatggttgcagagaaaaggcagcagggcattgggtaagggcctgtcccagggtcaggccagagtccccggagagaagcaagaggcagttggttgggagagttagccggaccagtaggacagttcttatcatagggccannnnnnnnnnnnnnnnnnnnnnnnnnnnnnnnnnnnnnnnnnnnnnnnnnnnnnnnnnnnnnnnnnnnnnnnnnnnnnnnnnnnnnnnnnnnnnnnnnnnnnnnnnnnnnnnnnnnnnnnnnnnnnnnnnnnnnnnnnnnnnnnnnnnnnnnnnnnnnnnnnnnnnnnnnnnnnnnnnnnnnnnnnnnnnnnnnnnnnnnncatatacacacacacacatatatatatacatacacacacatatatacatatacatacatacacacacacacacacacatatatgcacatatatcttcagtcatggttatacacttctgtaatcccaacgcttgggacacagcaggagaatgaggttaaggccagcctgagcttcactgtgacactttgctttccacccctaccccaaaaggaaatgaaatatttaagagagagaagagtcctgggtgctggaacccagaaggggaaactatgaagaacaatagcttaggccagctcgactttaaaagtagtttagtaggaagcaggaagcctgtcactgtgaagacacacatcaccaggctgaacggctggctaatgggggccatctggagaaataggaagtaggatgtattccacatggatgggtgatatgagctgtcccaggcaagcaactgtgaaatgttaaaccaggaaacagggcgtagaaatcacagaaggatgcttctaaaacacggcccagaatggcagaaggctttctgggaagctcgcacccacccagaaatgattaaggaagagataggttaattagcgcacgacccatgaagctagaaccgactctcatgcctgatactcgcgatagaaagagcgcatttccctagtaaggaaatcagtgggaaaaaccaacgtaaaggatataaaggacaaggcacgagaaaacactgcggtgggggagaaactgggtgagctccaagctgactggaaaaatgctagctcagaggaagccgaatgcaaatcacaatcaacccactcttcttttcttttttgcctgcccgactgtcaaaaacattcgcgcccgcctgaacctctgagatgatgggaggttagaggaaggggctggctaacgcattgcctgccagcaggagcctgaatgagtcctggagggcagttaaaaacaagcgcctagccctgcacccaatccaatgacccagaggattgggggggggggacggggggnnnnnnnnnnnnnnnnnnnnnnnnnnnnnnnnnnnnnnnnnnnnnnnnnnnnnnnnnnnnnnnnnnnnnnnnnnnnnnnnnnnnnnnnnnnnnnnnnnnnnnnnnnnnnnnnnnnnnnnnnnnnnnnnnnnnnnnnnnnnnnnnnnnnnnnnnnnnnnnnnnnnnnnnnnnnnnnnnnnnnnnnnnnnnnnnnnnnnnnnnnnnnnnnnnnnnnnnnnnnnnnnnnnnnnnnnnnnnnnnnnnnnnnnnnnnnnnnnnnnnnnnnnnnnnnnnnnnnnnnnnnnnnnnnnnnnnnnnnnnnnnnnnnnnnnnnnnnnnnnnnnnatgggtcaggtcagctgatgaggggactcaggcagcagggacactagcctgtaagccaggcttttgactactttgtgggttcttctttattccacccttctgcacccttattccaccgtttcaacccctaatactaggcaagaaagaatgagagaggagaaaggggtaatgttattgttaaaagagttcctgctaattagggccatagagttccttggggcaagtttgagcttccctgtcaagatatctaacaactttcctcctcctcctcctcctcctcctcctcctcctcctcctcctccttctcctttgcacataactatttaacaaacagcaaccaatcaacaaacaacagcagcccaccaatgggtctttagcatttatatattctccgaaaagtccctagaattccaactatcacacaattgcagaaactatctgcagctggcaaaatcagaaccctgctagagcacgaggcatgtcggtcagctgctatggacaatctgaagcagtcccatttcccacacctgggattaaaacgaaaacatgttcttatagtatttctgtattttttaaagaatccaaaattctcactaactagccagagatattctttttgaaaatattttattttattatctttaaattatgtatatttgaggaatatgcatacatgtgtgcagttgcccctgaaggccagaagaggacgctatcccctggagagtactcgctcataatccctgagtcttctctctagcccctttaaatatgtttgagtttggttgtgtgaacatatttcccactcaaatgtaacagggaaatatcacaatgttgccaaaagctctaaaagcttttaaactatattgcttagggttcagctagtgggatggatgagtggaaggctagagtgaaggatcatgggttacctaaggttgagtgaagaaaggtcctcagagtctcaccctgaaccagtctcagagagtgcaaaaagctggggaccaaagagtagcagatgcagcagctagagaggtgatgtacctgaaagaggggagctccatccatccatccatccatccatccatccatccatgcatccatctacatctctgtgcatccacccatgcactcacccatgtgtgtatccattatccattcatccatcgctgtctatccatccacgaatgaaaccatccatccatgcatcatccatctgatccacctctccattcattcatccgtacaaacatacgtatgtgtatccacccatgtgtgcatcattcatccatgcatccatccatgcatctatgtatccatgtagccacccactgcagccatctgtgtatccatctctccattcatccatacactcatgtatccattcatctatcagtatatccattctacccatccctctactcatccatccatacatgaattcattcatttgcacaccatttatctgatccatcacatgtacacacacgcgtgcacacatgcatccatccatccatgccatgattcgcctatccatccatgtatgcatccatgcatctgtctgtctacctgtctgtctgtctgtccatccatgaattcattcatttgtgcaccattcatctgacccatcatgtgcatatatcttcataccatgatccaccacctatccatttgtgcatgcatgcatccatctctctctctctctctctctctctctctctctctctctctctctctttctccctctctctttctctctctctccatgcccatccacacaccctcccatctacctgaagtgagctaggggagctagctgcagaggggacaaggatgtcagatcctagctctgccacatgactaggtttctggtgaggaaagtccctgatggagggaatggcctgcgttcttctggggatttcctgggagaaagtcccctctctgagccctggttgtacctggtacagcctcccaggtggcatctcttgctcagctgtggagaggaaggagtgagcacgacagagtggcttagcgaggcccatagagctgcaaagaacagagaggggcagctcagtggctctggggaaggtcctgccaggctggtgcctgcctactgcttttcaccaattctttgggttaatctatcaaggtagagggcactttgacccatatgctgcccaccctgaactctatcccacacccactagggttagggtagaggcagctttccatttaaaaaaaaaaggtcatttaaaaaaattattccatttaaaagtgtttttggagctggagaggtggctcagtggttaagagcattggctgctcttccagaggacccgggttcaattcctagcacgtactagcagctcatagctgttcaggtccagaagatctgagactctcacacagacttacatgtaggcaaaaacatctatgtacataaaaaattaaaaaaaaaacaaaattacatgcttgttatgcgtgtatgtgcctgtgcatgccatgtgcaagtttagaagtcaaaagacaacttttctttgggggtcagggggaggtcaccttttttcttctgagttctggggattgcattcaactcaccaggcttggcagcaatcacctttatccccactgagccagcttgccagcccctaaatcaatctgtgtgtgtgtgtgtgtgtgtgtgtgtgtgtgtgtgtgtgtgtgtgtttgttgtggagggtgcacttttgccacggtgcctgtgtggaggtcacaaggccagctcaggactcaatcctagtcatccctttgctttgaggcaaaggctagccggcagtgagcttccggggtgttcctccttccaccttctgtctcacagtaggactgtctgtatcacagaatggtccccactctgcctgtcttttatgtggcttctgaagaagttcaggttctcctgctgtgtggcaagctttctacccactgagccgccatctcctctgcccaaagggatgttttcaaacctcttatttccacaacaatttaaagagtcagctctggggaggatcttgagataaagatcagctggctgtttaaggggaaagtgtttagggaggtatagcaattctaaaggtatgtgtggctgatgatatagcctcagggtttagaaagcaaagattggatgggggtttgggcagagctactgttgtagtggagataggacacctggccttggaagggagttctagccagatagtgtcttctttgtgacactaaaaaagactgagcactctcagcaagcatttctgatggtaaatagtttgcagctaacttacacccattcactaagaatgccacaagcctggtactcaagtctgtcatgccctcagggctcagcagggcacggtacatggtgcgtggttcacagttctttgtaagaaaagcatctttgggaggcataggcttcccctggcctgtggacatgagtgatacaccttcaaaggacacactatgaaaaaggagatcacaagtcaaaaacggcgtagcgctaaaacataaaacaacgcacacagaaatatcaagattggtaaattgtgtgtgagcatgtgtgcacacgtgtgcaggtcaccacccgtgagcccacgtggaggcagagtgagagtattgtggggaggggacagccaaacagattgtcaggactgtttaagcagggtgacagacagcacatcagaaaatattgttctctgtagcatctccgttcatatggaaaagtgttcggtgaacagaatgaaaactgaagccactgttaggaggagcagtggcaagcagaggtaatgggcaacagctctctcatgtttcatgttaagacatcagaagcgccttgttcaggccaggactgaggctccacgcctagcactgtgggcttatgcaaccttcccgtaaagagcccaaacaagccaaggaatgactattataacattaagaggaagaacactgtcacttaaaaaaaacaaaaaacaagcaagcaaacaaacaaaaaaaccaactagtgataaaactttcctctgtccactgtcaggtttgttagcaaatttcaaggtatctgtagcaagagccagcaaggaggctcagaggggaaagaacttcctgccaagtctgatgacctgagtctgatccccagggtcccacatggtggaaggagagaaccggcgacttccatgggtgtgtgcgtgggcacgcacacaaatacattttccattttaaaagcagccatgggtctctctttgtgccaggtttccacatacacaaatccaatatgcaaaggctgacatttccccttcatccaaggagtggcaaggaaattcaatttgagaattattagctacagtagtgctgagagtaataaggaagcaagaagtgaatcttttgaaaaaggtgcctgacctttctgggaggaaatggtaaaattttattgaaagatataaaggagaaggtgaagatgctaacaggcagacagaatgactatcacaaggatgtcaggtccctactcgctgctgcaggttgaacgcaggacagcccaggactcttatgtcatttgcttgagcttattccacagtgtagatggaagagcagagattcatcaaacactagaacaatcctgaaggaatgtaagagaggcacgtttctcctaggcttggagctggggtaactgaagcaggcttgtgtcagcccctgggtggatgggaggactagcagagaaaggggccaaggtttggtttgcaggtgacagtcttggtccacgaggcttcttgactgcccattcactgggaaaagataggtagaactttgtttaatagatggcactctgggatgatggtctgtgtccattgtcagcacgacagagtcacctgggagaaagacatctggagcacatcgatttgaggtgggaagatcagcccactgtgggtggcaccatcctgtaggctgggaaactgcattgtgttaaatgaagaaaggatctgagcagcaatgcgctcatcgttgtttcctgattgtgggcaaccagctgctccaagctcctgctactctgacgacttccccactgtgatggattctaaccttgaaccatgaaccagaataaaccctttctcccttctgtcgctgtggtcggagtattttttttttcatagtgataggaatagaaactaagaaagccctagagaaatcaaatcaacatctcacaaaacctactagcagcccctttgtcatctaaaatccactctgtgtatcaaggtcactgtctgtagacagaaactgtacacactttgtagaatatctttgtgaaattgcataggaatgcttaagaaagaatcactcaaagagtatcaatcattagggaagaaaaattaaagttgaccacatacaaataaacctttataaatatcacagcttcaaaaaaaataattccacatactggaaatgaactatgaaacggttatagcaattcacacttgaaaaatcaaacaccgaacttctccaaataaatatgaggggaaaaaatactccagtagagaaatggacaaatacacaaatagtaacttgtgtaataggaaacccaaaagtccaataaacaactaaaaacacaaatgcccaacaaaacacctgcaaacacaaacacccaaccaaacacttataaacacaaatgcccaacacaaggcgagtgtagttgatatcatcaaaacggcaagaagcctacgacagtttgtaggtaggattttcggtttggagtggtttcccagctaggatcttgctgtatcgctcgatggctctggctgccttggaactctcactctgaatcctggactcaagctcccagcaatccctttgtctcagcttcctgaaagcttagattgcaccatgctgtgagaaggtttggacttgccaaacttctaccagcttgctctactgcatctgtnnnnnnnnnnnnnnnnnnnnnnnnnnnnnnnnnnnnnnnnnnnnnnnnnnnnnnnnnnnnnnnnnnnnnnnnnnnnnnnnnnnnnnnnnnnnnnnnnnnnnnnnnnnnnnnnnnnnnnnnnnnnnnnnnnnnnnnnnnnnnnnnnnnnnnnnnnnnnnnnnnnnnnnnnnnnnnnnnnnnnnnnnnnnnnnnnnnnnnnnnnnnnnnnnnnnnnnnnnnnnnnnnnnnnnncaatttccccccttcctccccttcctccttttctcccctctcctctacctcttcccttctctctttccctccccctcctttgccttctctctacacactggcccttgcttaggcagcaccccccccccccccgggccaactttgtttgacatcacacgtcatagccaccagttttccctgctggtgactctgaggtcactctgtagctctcccttggcccatgtctcctgccttgctcacagcacctgtggttgtggtttgccttctctacagagcaggaactccaggacaacctggcttcctgcattttagagtcaccagctcccaacacaatgcctgatacacagtaggcactcaagtgtttgcccatgggagtcaggccaactgacttcttggaggatgcagattcttcgagagcaactttgtccctgccctggcttaggaagtgaatcttcaattctctagggtgcctgggttccctttggagcctaagtcaagtgcccttggtggcctgggcccaacctagcacctgtggggccccaggtcctcttccagaccgcatgctccaccccctcaaggctgtggggcagcagcttgggtaagttcctcttccgtttcctcccgcctcttgagctggggtgctgctcctcactgccgggtacctcctagccactccataccactggtgtccacagcaacgctcctggcccccaactgtcatccctggctgctgggcctcagatgcaatgcaggccatcaagtgtgtggtggtgggtgatgggtaagtacctggctgagttgtctcccacccctaccaggatgcctctgagatcctccctggtacacccacagattcagggctcccaggaggttctggggaaagtcgcttcctttccttgtaagggcttacaaggaacatttggggtgggtctggactgctccctgtccttcagcctaccccactccggaagctacttgggtggagggcctggactgtgggtggggtgctgctatttgcctgtaccctgagagctgggacagggctcctaccgggccagcatcagttcagggtacaggtacgaggagggaaatcagcagcttgcccttcggacctttgtttcccaggctggcccaggctctagttgctgtcttgctgggcctaggggacttctggcaatctccaagctttctgactctcagtccagcctctgctcttaaggactccagagggcaggctggctgcagccctgctaaagtctgatagtcattgtcagatcttgggaccacaggctctcataacccaaggcctgagtttcttcatgtgtctcccatatattccgacacattagggtgcagtcctcaagtctatcttgggtcccgctagatccatcctcacatgtactagacagccatcttcagttcgaaacggggaggggctgaggcctggagagctttcctggcttaggtcccaaggtcacacacactttggctctgctggtggcataggctatctacctcctcagctgactaggtccgacttggtcgctgctgcagccgccaccgcgctagggtgtcagccgttatctgtggcagctgctctgctcacttctgctttgtgtctgatctgggggaggagggggcggacacggagggccggaagtcaatgattctatgcattcaaagttacctgggtggcaggctggggcttgagggcagaggtttagggggcagggacagcagagcaacctcctcgagtgggaagtgacttaacggaattgtactggggaaggcccggagctgtccctctggcctctcagcttcctgctgaatgacctgggtgacctcccagcttggcagggagatagcttaaatggtggtcatctccatttatcccattctcttttgtatgtggtcaccgggctgtggctctctgtatgatctgtcttccaccaaccctacttaccatcacagagttcgttttacaggtgggaaagaccaaaactccgaaaagttacataacctgccttggaggcagaggatttgaacccaggcccctctgacttcaaagaggggcgatgggcagtccctaacagtcattagttggtgccacttctatggcaccgggttcagtgtcttagaagtatcagttattttactgggaagatgggcttgtccttgttgtctacatggggaaactgaggtacaaggtgcttaggtgacttgcaaagttgtgtagatggcaaatgatggaggcaggatctgaagcttaagagagacacgtgacagtcttacccagctctccagggtcctctgttcggccccatggtcatctgtgcctatcacctgtatcccacacactggtacatgtacagtactggagttctcctcagatgtgtggctcacacccatggctaagactgaagtcaggttctttatgggcactgcacggggtagagcacactggtatggggtgtctgggattgggagactggagcctgagtacagttcccgcctccccttcatcttgaccttggtgaaggggagctatgaccttggtctctcctgcatcttgtctcttgtctttcagagccgtgggcaagacgtgtcttctcatcagctacaccaccaacgccttccctggagaatacatccccactgtgtgagtggcttcttgggggctgtcccctgtgggggcctgagaccaagtaggctggtaaggctagagagactctccattgtggggaagctggctggtgatccgacatgcaacgcagtgacttatgctaagtcttagaatgtatgctaaggaggcagaggctccagaaggcagagggactgtggggtgggaaggcgtaaaaggacaggaaggaatatgtccttcaagccagccaggaggagaaagaggggtggagatgggctatggaggtgagggaggaagagtacctcagaaacttagcagcagtgtctggggacccgtgtgctggggtgggcacagtgctagctgtggtctgtgggaagcctatcttctggtgcaggatgtagccatccgctcccacatgatacacaaggagtccgcaggtgtcagaagagtctcagagcatccccatactcacagagcagctccccagcttcctgcatagatttcaagctcttcaagtatcccccaatcttcccttctagagatgttacccactgttttgctttattggatcaacgatccttaggcaaacctaccgcaggacctttgcaccagctcttctccctgccagaaatgccctagggtgatttcttgtctcattctcatacctacaccctccaggcctatccatggtgccctcctggaagccttcaaggctaaaggcctgtcaatcgccagaggagcttgccagctctctctcaagaccaaggacccatatgttgagaaggccttggcttctcaagaaagtggttgatacattgtgtaatatacatatgtctcataagtgatatctgtgcctcgaggtgacgagatccagagaagtcttcaccactagcatctagttagaatgcctttgggttggtggccctgtacaggataccacactagtgattgcattgggtcctcaagggaaatgggtgttacaatatcctgatggccaatagccaatagcagctatgaggcttgtccccctgggtcactcagcctgtctgccttcagtatctcaccggggccttcatttttatcttcatggaagccctgcctggagtagaaagcagagatatacagagggatagtatcctgagcccaaagcttcccacactatcaaaggagccaccacccaaccagtgccaaaccaaggctccgctccaagtccctagtccggctctatagggatccctttctggaacagaggattcagctgcctctaatacctggctaagctgaaggacccagcagggggcagccagaggggctgggcaggcagctggacaccgatttctgcccaactgcatcctgatttgaatgaagactaaaaacttccctggtacacaaagcatgaatgactcctgccattaggcttataagtcagagaggactgaggctagacctgagcaagaacaggatcaaaggggattatggctgaaggtcactgtcaccaggtgtgctgatgctgttcttgtccctgagtcaaggccctagcctgcctttacctgctcaggcagccccgagaacccacttgctcaaggatttccaagcactcactcttcctctgagcccacgagctcagtttccttttctaccagaggcaagccctggactgggagatccaagccttgggaagcagtgtccctgtgaggaggtgggaggtggaagtcagaggctttccagtgtcctagcggcccatgacagaccgcactgctggccagccggtcaggtgccgagggccctcaggtctgtccacgatcaatcaccatgtcctgttcaggtggtagctggggccgggctgtcactgggacttcctcctctgagatgaactttcttccaatgaggttggcacacatattctcagatggggacacctgcccgagaatggttctatgtcaagtgttagggacacagaggcatgtcagcagctccgtgctttcgggcgctgtgatgtgggctctcatcctgtctcctacctgactctgtccaactgaagcccacataaactttaaacttttggttttgtttttcccgtttgtggtaggatatatactcaggctggccttgagcttgtagnnnnnnnnnnnnnnnnnnnnnnnnnnnnnnnnnnnnnnnnnnnnnnnnnnnnnnnnnnnnnnnnnnnnnnnnnnnnnnnnnnnnnnnnnnnnnnnnnnnnnnnnnnnnnnnnnnnnnnnnnnnnnnttaattaatgaatttatttattttccccctagatgaacttttaaaaagaagaacttagctagagcctcaacctggcccaagcccttcatctggccccccctttatgcttaaaatccagtacaaggggttatcaaagctccccaagttccacctcacctgccccatctcttccagctgttcagtcctgtccacaatctcctgggctctcttggctccctgctctccctcagagagccccaggagcacgcccccctttctgacagtgttccctgtctgctgcagcccacccctcccactttatgtcttccccactgagaactcttcagggctggggcagagccgtgcgaggccaggaggctggtatatctagctcactcctgattctagagcaaaataccagtttctagaccatcacacagcagctgctggcagtgggcagagcaccctggccggtgggtggagcctgtccagtgctttgccaaccctctgctgttcattggctggcaccccccaatggatatcataagaagagcagccactttccatgcttctgagccgacctggggcctcagtttcctctctggtctcctgggtcatgtgagacttcaaggcctaatacgcgtagggaatccccttccacctgaccaaggaaggcacttgaagggcgctttgaaaggtcctgaccgttccctaccttctctgggtgtcctgaaagctcagaggagccaaaaagacagatgcctttgcctcaaggcatcttgggacgatagagggtcctgatgtctccagcttgccagaaccccacacagctaaggcacttgccttctgaccttgaccacccttgtctcccagaaggttcttctgagactcacaaggatgcttcccagagtaggcacacagcagccctatgtgccgaccacctattctggactagctttagggcagaaagtaacaagctgggttcccctgtcccccccccccgcccccgcaaggaatgtaattagtggggctgacctggctgaggcagaaaagtctccctggagtgatgcaaagagtcctgttgagggtgagaagcaagttaggatacgtgggactgtcctacgtaggtaagctggaataggaaggagtatttctccagatgtcagtgtgggcaacctcaggaggtgggtggtgtgagcctgccgggtgaaggaagagcagatagagaagctaggagctcgaggtcttagtgaaccctgtcatgagacaaggagtgggtgcatgtgtaagctcagtgaggtcggatgatctctagacccaggggcaggcaatggaggtgtccctaaatcacagctatggcagggcatagtgagcctgttggacacagcttgtcccttaggttggtcactcactggctgtgtaacctcgggtgagtcacgaagcctctctgatcttggtttcgctccacctccccccaccgtaccatgaggagcctgttcttttaacctaggtattcgattttactttcaaaagtgctctctccacttagcgtagaccactgggctggaacacccccatggctcagagtgttccctgtcccaacacgagcttgctgggctcctggtctagtgtttggcccacaccaatacaaggcttagacatgtctatgggtctgtctgtcccttggaactggccctagcacagtcacttgtcatatgagtggagagtgggtcatctgctgagtcctgcccctccaggaggctcaggacctcccttcaccttcccacaggcctgccaggagaacagctcactggtgctggcctggctgtgttccgtctccttcctgtttcccctctgacagcttcccaagtacaccttgcacctcctctctcacccaggattggcttcagggagacccagcttaactcagggacaagccgccactcaatagacaccgtgcgacccacgctaggtgtccagcatagggggaagattaagttcactctgatcaacctgggaaagaatctcacacaacccagcaatcccctttcccagggacgagaaaagggaggcagaaagaaaaaaacaaaacaaacaaacaaacaaaaacaaaaaaaaaaccaaaaccaaaaacaaaaacaaacaaacaaaacaaaaacccaactgatcaagacggtcatcctctttgtttacttgtacttaaggcatttgtaatagtatccattagttgtggaaacagccagttgcacggtgctgtgtgactttgggctggtcacagtccctctctgagtcctggcctcgggagaacaacactggcctgggctggaagtccgggcatctgggttcaaggctgacccgttcctttctgctccttacagatttgacaactactcagccaatgtgatggtggacagtaagccggtgaacctggggctgtgggataccgcaggtcaggaggactatgaccgcctccggccactctcctacccacagacagtgcgtacccgcccctgtgcctccttgtggtccctgtcttgatcctgttccatttactgctgatggccttcaggccagcagtgtctgctcagccctgagtctccctttgaggcctgggggggagggaggggcagagctagggtcctccctcagccatgctgccccgagtatcaccatgccccgagatgctagcctttctcagtgtgtgccaggcaggggctagtgtgcctggagctggggtaggcaggtggcctgctgcaggggactctgtggcttctgggtccctagagctgggctctctacccacaagggcaaagggagtcggcaggtagatggttatgggagccgagggatggtttcccagacaggaccctggcctccctatgctaacctgccctgttctgtatttaggatgtatttctcatctgcttctcgctagtcagcccagcctcctatgagaatgtccgtgccaaggtgagccacgagtggcctgggaagggtgctgaggaaaggggaatgggctatcctgggttaggagaggccaggggagagagggtcactagtaccacacaggaccaatgagaggagagtctccttgggctgtgtgtgtgttgtggggggaggggtgggacagtgagggttcctcctgcctctgagccctgtccctttgtctatccaacctcgtgcctcttcttatcaacacacaaactcgcttgactcttatctccaaaaaagtcttgccatttttttgtttttgcatgcctgctcagatcctgctctgccttgtgaccctcccgctaggggggctcttaccccccttttcctggtgccttgggcgtctttgtcccactccccactgctccctctcactctccactcccccacctccagtggttccctgaggtacggcaccactgccccagcacccccatcatcctggtgggtaccaagctggaccttcgcgatgacaaggacaccatcgagaagctgaaggagaagaagctggctcccatcacctacccgcagggcctggcactggccaaggatattggtatggggcttgagctcagagagagagggtatctgggggttggaggtgcctgaacacagccttgtcttagcgctatgctgcatggtcaaactctgttctcccaaccattgtaccagctgtgtgacctaggctggtcccttggcctctctatgcctgtgtttctctgtcacaaaggtataacagcagtgatggcttctgccatgtcagtgcctgggtaaaatgacttggtccacggtccccagaacatcacagcatgggatgggaggcatagcctatgattgcttggagcacagnnnnnnnnnnnnnnnnnnnnnnnnnnnnnnnnnnnnnnnnnnnnnnnnnnnnnnnnnnnnnnnnnnnnnnnnnnnnnnnnnnnnnnnnnnnnnnnnnnnnnnnnnnnnnnnnnnnnnnnnnnnnnnnnnnnnnnnnnnnnnnnnnnnnnnnnnnnnnnnnnnnnnnnnnnnnnnnnnnnnnnnnnnnnnnnnnnnnnnnnnnnnnnnnnnnnnnnnnnnnnnnnnnnnnnnnnnnnnnnnnnnnnnnnnnnnnnnnnnnnnnnnnnnnnnnnnnnnnnnnnnnnnnnnnnnnnnnnnnnnnnnnnnnnnnnnnnnnnnnnnnnnnnnnnnnnnnnnnnnnnnnnnnnnnnnnnnnnnnnnnnnnnnnnnnnnnnnnnnnnnnnnnnnnnnnnnnnnnnnnnnnnnnnnnnnnnnnnnnnnnnnnnnnnnnnnnnnnnnnnnnnnnnnnnnnnnnnnnnnnnnnnnnnnnnnnnnnnnnnnnnnnnnnnnnnnnnnnnnnnnnnnnnnnnnnnnnnnnnnnnnnnnnnnnnnnnnnnnnnnnnnnnnnnnnnnnnnnnnnnnnnnnnnnnnnnnnnnnnnnnnnnnnnnnnnnnnnnnnnnnnnnnnnnnnnnnnnnnnnnnnnnnnnnnnnnnnnnnnnnnnnnnnnnnnnnnnnnnnnnnnnnnnnnnnnnnnnnnnnnnnnnnnnnnnnnnnnnnnnnnnnnnnnnnnnnnnnnnnnnnnnnnnnnnnnnnnnnnnnnnnnnnnnnnnnnnnnnnnnnnnnnnnnnnnnnnnnnnnnnnnnnnnnnnnnnnnnnnnnnnnnnnnnnnnnnnnnnnnnnnnnnnnnnnnnnnnnnnnnnnnnnnnnnnnnnnnnnnnnnnnnnnnnnnnnnnnnnnnnnnnnnnnnnnnnnnnnnnnnnnnnnnnnnnnnnnnnnnnnnnnnnnnnnnnnnnnnnnnnnnnnnnnnnnnnnnnnnnnnnnnnnnnnnnnnnnnnnnnnnnnnnnnnnnnnnnnnnnnnnnnnnnnnnnnnnnnnnnnnnnnnnnnnnnnnnnnnnnnnnnnnnnnnnnnnnnnnnnnnnnnnnnnnnnnnnnnnnnnnnnnnnnnnnnnnnnnnnnnnnnnnnnnnnnnnnnnnnnnnnnnnnnnnnnnnnnnnnnnnnnnnnnnnnnnnnnnnnnnnnnnnnnnnnnnnnnnnnnnnnnnnnnnnnnnnnnnnnnnnnnnnnnnnnnnnnnnnnnnnnnnnnnnnnnnnnnnnnnnnnnnnnnnnnnnnnnnnnnnnnnnnnnnnnnnnnnnnnnnnnnnnnnnnnnnnnnnnnnnnnnnnnnnnnnnnnnnnnnnnnnnnnnnnnnnnnnnnnnnnnnnnnnnnnnnnnnnnnnnnnnnnnnnnnnnnnnnnnnnnnnnnnnnnnnnnnnnnnnnnnnnnnnnnnnnnnnnnnnnnnnnnnnnnnnnnnnnnnnnnnnnnnnnnnnnnnnnnnnnnnnnnnnnnnnnnnnnnnnnnnnnnnnnnnnnnnnnnnnnnnnnnnnnnnnnnnnnnnnnnnnnnnnnnnnnnnnnnnnnnnnnnnnnnnnnnnnnnnnnnnnnnnnnnnnnnnnnnnnnnnnnnnnnnnnnnnnnnnnnnnnnnnnnnnnnnnnnnnnnnnnnnnnnnnnnnnnnnnnnnnnnnnnnnnnnnnnnnnnnnnnnnnnnnnnnnnnnnnnnnnnnnnnnnnnnnnnnnnnnnnnnnnnnnnnnnnnnnnnnnnnnnnnnnnnnnnnnnnnnnnnnnnnnnnnnnnnnnnnnnnnnnnnnnnnnnnnnnnnnnnnnnnnnnnnnnnnnnnnnnnnnnnnnnnnnnnnnnnnnnnnnnnnnnnnnnnnnnnnnnnnnnnnnnnnnnnnnnnnnnnnnnnnnnnnnnnnnnnnnnnnnnnnnnnnnnnnnnnnnnnnnnnnnnnnnnnnnnnnnnnnnnnnnnnnnnnnnnnnnnnnnnnnnnnnnnnnnnnnnnnnnnnnnnnnnnnnnnnnnnnnnnnnnnnnnnnnnnnnnnnnnnnnnnnnnnnnnnnnnnnnnnnnnnnnnnnnnnnnnnnnnnnnnnnnnnnnnnnnnnnnnnnnnnnnnnnnnnnnnnnnnnnnnnnnnnnnnnnnnnnnnnnnnnnnnnnnnnnnnnnnnnnnnnnnnnnnnnnnnnnnnnnnnnnnnnnnnnnnnnnnnnnnnnnnnnnnnnnnnnnnnnnnnnnnnnnnnnnnnnnnnnnnnnnnnnnnnnnnnnnnnnnnnnnnnnnnnnnnnnnnnnnnnnnnnnnnnnnnnnnnnnnnnnnnnnnnnnnnnnnnnnnnnnnnnnnnnnnnnnnnnnnnnnnnnnnnnnnnnnnnnnnnnnnnnnnnnnnnnnnnnnnnnnnnnnnnnnnnnnnnnnnnnnnnnnnnnnnnnnnnnnnnnnnnnnnnnnnnnnnnnnnnnnnnnnnnnnnnnnnnnnnnnnnnnnnnnnnnnnnnnnnnnnnnnnnnnnnnnnnnnnnnnnnnnnnnnnnnnnnnnnnnnnnnnnnnnnnnnnnnnnnnnnnnnnnnnnnnnnnnnnnnnnnnnnnnnnnnnnnnnnnnnnnnnnnnnnnnnnnnnnnnnnnnnnnnnnnnnnnnnnnnnnnnnnnnnnnnnnnnnnnnnnnnnnnnnnnnnnnnnnnnnnnnnnnnnnnnnnnnnnnnnnnnnnnnnnnnnnnnnnnnnnnnnnnnnnnnnnnnnnnnnnnnnnnnnnnnnnnnnnnnnnnnnnnnnnnnnnnnnnnnnnnnnnnnnnnnnnnnnnnnnnnnnnnnnnnnnnnnnnnnnnnnnnnnnnnnnnnnnnnnnnnnnnnnnnnnnnnnnnnnnnnnnnnnnnnnnnnnnnnnnnnnnnnnnnnnnnnnnnnnnnnnnnnnnnnnnnnnnnnnnnnnnnnnnnnnnnnnnnnnnnnnnnnnnnnnnnnnnnnnnnnnnnnnnnnnnnnnnnnnnnnnnnnnnnnnnnnnnnnnnnnnnnnnnnnnnnnnnnnnnnnnnnnnnnnnnnnnnnnnnnnnnnnnnnnnnnnnnnnnnnnnnnnnnnnnnnnnnnnnnnnnnnnnnnnnnnnnnnnnnnnnnnnnnnnnnnnnnnnnnnnnnnnnnnnnnnnnnnnnnnnnnnnnnnnnnnnnatcctttgtggggagctgaaagcccctcccttgcagctgctgtgaggatgggcaggtgaatggccagctgaatgcctagggacccagcttcagagtgcctcactgctggtcaccacaagaatggggaacccatgagcccccacccagagtcatctctggaacaaacggctggatgccagggcaggaccctggcttcatcttctcagtgggaatatggagccttgagaactttccaggaacaagaagcacctggtgtgatgcacagggtctggcttcctgaagctccatttcctcctggctgccatgacccgtttcccaagccctggcttcagtggcttcctctccaggggtgaccgctctttgcagttctgtgggcctgtggctgctctgcgctgggcccactgaggcggggagagccaccagttcctcacagctgtcagaagtgcctgccccagaaaggaaagcagaaggagccagggaagtcaccggcctccctttctttccctttccttcctcggaccctgcatctcccagcctctgtgtcagggctctgggctcaggttgcaggggtgggtagccatgcagatgccaccaggggcctgtcctctggagggcacagaagagctcactattttcatctccttactgagttgccctggggcaggcaggtcccacagctgctgttatggtttgcccataaattggggtgtgactaaatgatagatatattggggtttcctcatacctgctcagaggtgtcagctctatgaggaaggctgtggggaacttggtcactgaagcaggtcatctccaccttccaaacaaagggtcttgtgtcctggggtctttcaccatccctactgagtctacaagaagaagatgaagtacagagaggcatattcccattcgggtgatactccccacttgagtgatactccctgtttgagtgatactccccactcaggtgatactccccactcaagtgatactcctagttgactgatactccctacttgggtgatactccccactcaaatgatactcctagttgagtgatactccctacttgggtgatactcccactcaagtgatactccctacttgggcgatactcccctctcgggttgacacagcttctccatgactcaggcccctgctctccctgtctctcctcagattcagtcaagtacttggaatgttctgcactcacccagcgaggcctgaagaccgtcttcgatgaggcaatccgcgcagtcctctgcccacagcccacacgacagcagaagcgcccctgcagcctgctctaggggtattacacctctcctctgctgctggaagggcaccctgcccctgggcccagcccttaggtcactgagagtaaagttagaccaggacagagggccatgggtacctaggtagcctcagtttcccctctctgtcactacctgtgaagagtcttccttgacggatacaacccaagcaagctagaacctgccaatgccctaagccaagacacaagagctgcctggctctcattaagcctgtccttgtcacaaaaaccagagaaccccaaccataccctgggcaggatacatggggggtatgtggggaggagttggaagagagttctggggcaggcagaaattgaaagcagccatggtcccggatggccctgagctgggaccttcttgtctgtcctcggcactgaccctctgctgtctcccttccaggtgtcaccccagtcctcccatcccaatggtcctgaccctccagggtccccaccaaagctcagtgacgtgctggtggaattgctgtttctccgtgtggcgttctttcccagttagctgcagaacttgcctctctcctccacggaggtccctggggatgggcggatgttcataggccacatcctatttgggaggttcctatgttcccaggggccatcagggacccccaagacgcagccatccatcctcatacagagtcatatgcccacctgctccaggccttcctgacacctctctcgaagcttccggtctccatggcctgccactagtgtgttcgccatgttgggataccttcttccctgaaccaaagggagagatgtggaaatctgctcctctgttctcctttttcagaaaagcacagaacaaatctacttcagtaaatctctcatctgcccagccaagtgagggtctgagctcagccaacccctactgtctctcgagacctcctactctacttgaagggtagagctattccttcttgggactgtccactccacctgccagtcaggacccgatccatagcaaatggaaaatacagctctcttgcttacacagaaaataaatgtgttgattcttttggtggaagtgcagtgagttcaggcacagcttgatcaaggtggggcgaagggatcagatgacaccacggagcctggcttcctgcctgttttgggtctgcctgctgctgccaggctcatttttctggccattgattcttgggacttgatcctccgaggtcaagttcaggtgatgtctgccccaggcaagctctaaggaaaggtcactctggttgaaccagcttgtcttaggcccaccttcaatcacacaagtgtgtcagagagaggctgcactgtggctggctgtgagttgtgttagagccaggagcagaggtgatgccagggagctggggtatagaatgggtgtgtgtggcgttgggggaataaattctttagggaacaaccttcttaaaactgggtgggtatccagtagctagggttctataacccccgactgtcagaggtcacggtaagtgtcctttctaccattatcagggacagtttctgccccagctggcactaagaaaaacagatttttaaaatttgttttttttttgtttgtttgttttgttttgttttgttttgtttgagacagggtttctctgtgtagctctggctgtcctggaactcactttgtagaccaggctgtcctcgaactcagaaatctgcctgcctctgcctcctaagtgctgggattaaaggcgtgcaccaccattgcccggctcatttgtttttgagataagattttattatatagcctgggctgacctcagacttgccatcctcctgcctcagcttcctaaattctgggtttacagatgtatacttccgtgcctggataaggttgaaattcttactagagagttctatggaagttgatgtggtgtccatatcaggcacccagggcctgggcctgagacagtcctacctacatcttccctgaattatcaatctatggtcaagaccgtggcactgtctgagcttccacgtccttctcccaacacacttttgatggcctgtctgtgtcaggtgctaccatagtctcagagattcagtgacatatgtgttgttctccacccctcccccaccccccagccctggagtctccgaggctgagagaaaatggctcccccgacattggaaagctagccctaaggagctcagcattttctgtctccaagagttccagagctgccccccaactcctcccccccaaacttaagggactccacctctggaggggcttggcccagtgagggaagcttctgttcttagcttggctcacacgagggcaagatttctctgacacagaaagaaaggttttaagcccacaggtgctgtgttctccaacacggttgagaggacctgcacccccatcgctttggggagttaaagacctggggtgcacccagagtccctcttttagctctctgctccttttctagtgcatgatactaagcaaaaccttacatgattcaaaaccgtagatctaagcccagaacctctcaaactaagcctctaagtagctaaacctccccctcctcctcccccgcccccttctgtaggaggcaaaccccggcctgttaccttgagcctctgtgtgagttgtggagcacacagccagcccactgtcaccttgacagcttatttcacccagatctcagctttcactttaatctgaataaagtccccgatacttttgcaatttgtgtggaattttatttcggttccttgactaagaggccaagaaccgagaaaaccctgaccggactccccaccaccactagtgacctttcttctccttctgttgcccacccacccaggccctgtccctgtgtgccttaaactcccctgtgtgctgggttgggctcctgctgtgggtgttcagctccctgccagctgccctggggtctttgccttaccccaagagtaatgacatgaaatacctgttccaccccctcaccgcacatgtaacctcagtcctgcatttggtcacttggggtgctgctagccattgcagaggaggaaacagggcctggaaagcctaggggtcagtgctctgatggacaaagcagcctgacccctcctgcccctccccgccctgccccttctgcttgtctcacccctccttctctcttccaacctccctaccttctcttacggttgctacccctcccactcctctctccctctcccaccccttccatccctcccactccctcctatcctctcccatccctcccacccatccctatcctctcccacccctcctgcccctcccccattcctctctccttgcctacagaatcccagtttagggcaggacagcagtgtgctcagcattgatgaaatacttgttttcagtgagaggaaaggctgtttaagtgtgtgtgcttgttgctgttagagcaaccaagttttgttcctaattccccctcccctggaggaggatctgacaccctcttttggcttctgtgggcacacacacacaccccattaaaaacaaaactaaacctttaaagtaaatatacgtgttttctcagcctttggggctccgaggtcacactgttttcaccaaccacatccacacaaggaaagtcagtcagagatgctgtttcttggaagaaagataacaaaagtggtctcttgctctgaaaactgatgggatgtccagagcagccactgtcacctggtgagcttgcagcctacagcatcaacagcagaagccaacggcttcaaacagagacagaaagataaaccgggccggtgctgttagcctgcatcagccttgcttccagaatgaatgctggaggacccagttactcgtttttagcacacttggccagacttcccaccgatgttccctgttagtacctgaggccctagaccctgagtgcagcggctgaggatcagaggcctcctgagcagcgaatgacaagctgtgagatggttttgaaacaggaggaagtgcttgctgggtaggctcagaagtgaggcttgctccacagcattcacctggtaccagagcacacagtgtgtggcctgggaggggccggggctctctactctatgctcagccctcttgtccatggcatcatggcccaggagtgaggtaagcacctgctggaccagacctccatctcttccaaagctctcagcctccagctagctgcttcctgctccttcttccgaagcagggacctcttagccccaccatctcacgtccacactcacaagtcaagcctggatgactgtcatcctagggtcccctaattcaagcccccaactgcactgcccctcctgagctgagccttggccctttcctctggtcagcagtgacgtctttcccaggatgcctcctgctttctctctctcagtccccgctccaaatgcaccgggaagtctcagtaggatcgtgtgtcacagactgtgccaccccaagtgtcatcctaagatctgctgttcgctggagccgggactcatctgacagactgtcatggagtctgggggctgcaccgtgccctcaggagctcacaggctatataggaggtccccatgtcagcagagaacagggaagtggtccctctgtgtagctgtcccctgtgctttcagtcccatgtgctctgtcaacatannnnnnnnnnnnnnnnnnnnnnnnnnnnnnnnnnnnnnnnnnnnnnnnnnnnnnnnnnnnnnnnnnnnnnnnnnnnnnnnnnnnnnnnnnnnnnnnnnnnnnnnnnnnnnnnnnnnnnnnnnnnnnnnnnnnnnnnnnnnnnnnnnnnnnnnnnnnnnnnnnnnnnnnnnnnnnnnnnnnnnnnnnnnnnnnnnnnnnnnnnnnnnnnnnnnnnnnnnnnnnnnnnnnnnnnnnnnnnnnnnnnnnnnnnnnnnnnnnnnnnnnnnnnnnnnnnnnnnnnnnnnnnnnnnnnnnnnnnnnnnnnnnnnnnnnnnnnnnnnnnnnnnnnnnnnnnnnnnnnnnnnnnnnnnnnnnnnnnnnnnnnnnnnnnnnnnnnnnnnnnnnnnnnnnnnnnnnnnnnnnnnnnnnnnnnnnnnnnnnnnnnnnnnnagagagagaaccagccatgcccataatctgccatcctgctgaagcaggtttctactgcccaccaaggtgtagccatgcctgtgatccatcttgtgtgtgccacatcagctgagtcccctctgactgccccatctactactaatgtgagcgaggagagcggcctggatgagcccagccatcccggatcatgagggggagcagcacagctcctctgcaggctctgagtctggagaaccttgatgtctgcagctttgctctgtctccccacccccacctgcctctacacaggcttcatgggatgtcagtaaaggacacagtaaagggtcctgcagatggcgaggcagagctagatgccatgagaggacccccaggaaggcaaaaggccacaaggcatagaagaacactggcttctattcactccctgtgtccccactcctctgtgctaagactgcacacacagagaaggatgaggcccagtcttttctcaccaggggctcggaggtcaggagagacagacacgtggatacctttgcccttgtgatttgttccacacatcagaatcttctgtacagaaaggaagagctctggtctgagggtcagtacatccggggttggtataccatgggatggtacatataccctaagtccttataccctggccctgtggaaaggtggccacgaaccgaggacagaagaaacagaaaaaaatctgtgtgcagagaaactgtgagacagctatgacctcaaatcctggtagttgaactatagagcagagggcggtgaaggctagacctcagggcatgatgggaagagggaaggatcggggaggggtgcagatcaaaacgacacagagaaagcccacctcctggaactggggggtggggtgtctggatctggacactgtaggctgtcgatgacagtgatggcttaggacactgaagagcctgcttgagggagcagttaaccttctgagcctgcttcaagaaagccagggtgaagacccacactgggtttggaagatgtgaattcgatcttacttggtaatccctccacagggacaagttagccaagatatagcatttaagggaagaaagatttgttttggcttgattccaaggctttggttggtggttggtcaattcctcccttttaggccagtagcgaggctggaacaccatgtaggaaggacatggagcagagcttgctcatctctgtaatctgccagcaaacggataaagaacaaagagccaggaccaaggtttacccttccgaaccacggtctgagtgacctgcgccgtacgttccgcagttccacttcccaacagtctgtctgaaattagactctcggggggttaaatcagtggttaactcagaggctccattatctagtcgtttctggaaatgatcacactcaggctgttctttattaatttcctaggtgtctctcaattcaatcaacttgataattgagattcacctttgcagtcccagcccatgtcagtttgacacctaatgcatttccttagatcacacttaatctccaaataaagacgtttgcagaagacgaccagtctactcaagacggctgccctgttcataccccggactacacggaggttttctccaaacatctcaacaatttcaatattgatcaaaagttcaaactgaaactgagagtccaggcaaattgacaaaatcaaaagtatataacaccacacagtaaacactcttattcttttgggttgaacagggtgtagagagactctttcgtgcactgggtgggagcatcacctgtcaataaaaagctactggcctattagcttagacaggaagtaggaggtgggagtcttggcaggaagagagggttctgggatagagtctgctgtgggaggatatttgcctgaactcggaggagacagatttatgaaactgagaagaggtagccagccgtgtggcactcatgaaatagaataaacagttaattgagttacgagttagtcggggaacaagcccaagcttgtggcttagccatttattaattcaagaagtaattccgaaggcgggttctgggccgcagcaatggcggaggcggcgggctggtaacgtgaaggtgggttggaaggaggaacagcagcagaaatgcagacagcacacacaggtttaagcactgcagatggcgcctacggtccgactagccgctgctgtcctggtaatgcaggcacaaaggcagttattcccagtggagcgcaccctgttggaagaggactggaagcctcccgaaatcccagcaaaagcatcgtgcctttaacccaaaggcctggaagccgatatcgtagatttgccctcttcgtgcctttcccgacctctttggaggcagaaatcgcctgtgggtccctagttccagatgtcgaaccacaccgagaactggtagggaaggagcttaaagtgagcggctgcctgctggaggtacgctggatcgcggaagattctcgactcctccgaatttccatcatcaactttcttgaccagctttccctagtggtaaacaccatacagctttttgggcccccggtttcccattaagtctggctggggacccaagactgaccttatttccatctcctcctaagcaatataattttccctagggaaaagattctagaaatagtaactactgcataaatgtgggggcctaatatttttttcctgacttgatcctcaggcacttaggggccatttagtctggtgcttcaatgtttgttgctgaagaaaataaagctatgctgctaatctgcatttggaaaaaaaaaagaagaagaagtaattcagtctcagagtctatttctggaatttaggcactggtagaaaagctcatggttaagcaggagaacagaaagatgtgaggccaaagacccaacaggtcaaacatcaaatcctgtatatcatgttttgcatctggggcacacggtgtcatgatgtgaacgtcccggcacatatctcactgctctggccttgctggctctaatgcacacggtctctttcctgggttggctctgctcactgctcatggtttcccttggcagctcttccaagtctctggcatctccagcttggcctggtctccacagcatcttcacctttctccccagtttcacacaagaggggactcttggggctgacccagacacaacccccgtccccagcctcccaggattttctttggaatctgcgtggttgcctccgtgatcttacaacccttccactctttgtggctgcaaaaccagcgtcgtatgaacaacagaaggtctgccactgtctctgtggaccatgactgtggctgatgagcatggtgaaaggaattctgggaaagtcttttaaaagattacattaacagtatagacactgccaatggctgaggtctgaccaattcttgagatggccttgaagtactttttcctactggtcagatacaaggtcttggcttcttttgttgtttttgttattgttgttgttgttggtttttgttttctgaggcaggttctcactgcacagacacaactggcctgggacttcctttgtagaccaggttggccttgaactcacagagattctctcctgcctgtgcctctcagggttgggaataaagacgtgtgccattacaccagctatccttttaatggtgtgagtctctttagcaatctacttctcctctttgagctaactttaaccattccttttctgagcaatctgcaaggttttcaaatccttctctgttctcaccatcaacatggctaaaagcagctagcaataaccacgctgtaacctaaatgctgaaatgccttaaaactttctctgccagattagtcagtcagccaccttgaagctgagactcacaaagtctcatggtatggggaaaacagagttaggttcttggacaaacataagcaaacataaatggtgtgtggtctagttcctagagcattcatgttcccgtcagaagcttcacaggcactgactctgtccacatctgtcttagtcagggtttctattgctatgacgaggcaccgtgaccaaaaataacttggggagaaagggtttatgcactcacagttccatggaacagttcatcatcaaaaacaataagagatagaactcaagcagggcaggaaccagaggcaggagctgattcagaggccatgggggcaagctgcttactggcttgctcagcctgatttgttatagaacacagagcccacaatgtgctgggccctctcccaacaacttctgaaatcccctacagccagatcttatggagggatttttttgtcctttcaaatatctctaccttgtatcaagttgacataaaactagcaagcacaattgacctcttgttaacttgacacacaaacccatcaccattaaaccataacctttccttgattgtacttccctacaaccacacattaatattgacattacaatataaacattccaaattttagaagttccagagtctttaaattttttaaacacttaaaagtccagtctctttaaaatagccagtctcttttaaaatctggtcttttaaaattcaaagtctctcgtctgtgggctcctgtcaaataaaaaattaatcaaatgcttttctacttcaaaagggaggaaccagggcatggtcataatctgaacaaagaaacaccaaactccaaaagtgtgaataacctaaactgtccaattacctgggatcactcacaatcttctgggttcttctaaggggcttgggtcactgcttttcctctgccttctgtagcatgcacagcttgtcttctaggctccgtctggctacaccccagtgctcttgctgctcttggtgatcaccccatggtacgtgtgtcttcaaaaatgctcgagttctgtcttagggcttctattgcagtgaagcgccatcatgaccatggtaacccttgttgagggaattatttaatcgaggttgccttccagtttcagaggtttagttcattaccttgacaagaagcaaagtgcatgaaggtaagcatggtgctggaaaaggagctgagatgtctacatcttgatccaaaggcagcagaagacagtgtgccatactgggtatagcttgagcatatgagacctcaaaacccactcccatagtgacacagttcctccgacaaggccacacccactccaacaaggctacatctcctaatagtgccactccctatgggccaagatttcaaacacatgaatctatggggccattcctatccagaccaccacaggtttcttgctgcaactgagctgcagttttaccaatagcctctcctggcctctcttcagggactccagtcaggctacacagtgccaaatctcagctgctcttcatgacccatttgtgtcttcaaaatcaggaccacctgggggtactcttgcactatcaagtttggttgccagcataaggtacaatcttggctccttctggaatacagattctgtgtgctgactcccagaagacactttccagaagatttcacctcaataatgctgtctcttaatcacagctaattctttagccgaacctgagcagaaccaaagattattcacataaatagcccagcaatctgcttccctctgaacttcataagttgggcatccattctctgcattgctttcaacaggtttatcttccaagctcctacagaacggctcactgagctctcaacactcaacgccttttgcagcccaaagttctgaagcttttccataatcctattcaaaacaacatggtcagttctgtcacggcaattaccccactcctggtaccaatttaacttagctaagttttctattgctgagataaaacacggtgataaaaaccacacagggagggaaggctttaaggcttcatttactcatggttccatataatatctccattgcattccagtttc

SEQ ID NO: 284 - DNA, 1255 bp, Mus musculus
ccaactgtcatccctggctgctgggcctcagatgcaatgcaggccatcaagtgtgtggtggtgggtgatggagccgtgggcaagacgtgtcttctcatcagctacaccaccaacgccttccctggagaatacatccccactgtatttgacaactactcagccaatgtgatggtggacagtaagccggtgaacctggggctgtgggataccgcaggtcaggaggactatgaccgcctccggccactctcctacccacagacagatgtatttctcatctgcttctcgctagtcagcccagcctcctatgagaatgtccgtgccaagtggttccctgaggtacggcaccactgccccagcacccccatcatcctggtgggtaccaagctggaccttcgcgatgacaaggacaccatcgagaagctgaaggagaagaagctggctcccatcacctacccgcagggcctggcactggccaaggatattgattcagtcaagtacttggaatgttctgcactcacccagcgaggcctgaagaccgtcttcgatgaggcaatccgcgcagtcctctgcccacagcccacacgacagcagaagcgcccctgcagcctgctctaggggtgtcacccagtcctcccatcccaatggtcctgaccctccagggtcccaccaaagctcagtgacgtgctggtggaattgctgtttctccgtgtggcgttctttcccagttagctgcagaacttgcctctctcctccacggaggtccctggggatgggcggatgttcataggccacatcctatttgggaggttcctatgttcccaggggccatcagggacccccaagacgcagccatccatcctcatacagagtcatatgcccacctgctccaggccttcctgacacctctctcgaagcttccggtctccatggcctgccactagtgtgttcgccatgttgggataccttcttccctgaaccaaagggagagatgtggaaatctgctcctctgttctcctttttcagaaaagcacagaacaaatctacttcagtaaatctctcatctgcccagccaagtgagggtctgagctcagccaacccctactgtctctcgagacctcctactctacttgaagggtagagctattccttcttgggactgtccactccacctgccagtcaggacccgatccatagcaaatggaaaatacagctctcttgcttacacagaaaataaatgtgttgattcttttggtgg

SEQ ID NO: 285 - DNA, 579 bp, Mus musculus
atgcaggccatcaagtgtgtggtggtgggtgatggagccgtgggcaagacgtgtcttctcatcagctacaccaccaacgccttccctggagaatacatccccactgtatttgacaactactcagccaatgtgatggtggacagtaagccggtgaacctggggctgtgggataccgcaggtcaggaggactatgaccgcctccggccactctcctacccacagacagatgtatttctcatctgcttctcgctagtcagcccagcctcctatgagaatgtccgtgccaagtggttccctgaggtacggcaccactgccccagcacccccatcatcctggtgggtaccaagctggaccttcgcgatgacaaggacaccatcgagaagctgaaggagaagaagctggctcccatcacctacccgcagggcctggcactggccaaggatattgattcagtcaagtacttggaatgttctgcactcacccagcgaggcctgaagaccgtcttcgatgaggcaatccgcgcagtcctctgcccacagcccacacgacagcagaagcgcccctgcagcctgctctag

SEQ ID NO: 286 - DNA, 38764 bp, Homo sapiens
  misc_feature (26811)..(26830): "n" at positions 26811 through 26830 can be any base.
gctacttgcgaggctgaggcatgagaatcactggaacccaggaggtggaggtggcagagagctgagatcacaccactgcactccagcctaggtgacagagtaagactctgtctcaaaaaaaaaaaaaaaaaaaaggaattccaaatagtcctataccccttaaagaaattgaattagtagtttaaaatctacccctcttccccctctcccccataattctgaaaccaggtccagatacagatggctttataaattttataaaatatttaagggagagataatgtaatattatccaaactggctgggcgcggtggctcacgcctgtaatcccagcactttgggaggccgaggcgggcagatcacgaggtcaggagatcgagaccatcctggctaacacggtgaaaccctgtctctactaaaaatacaaaaaattagccaggcgtggtggtgggcgcctgtaatcccagcaactcgggagactggggcaggagaatggagaatggtgtgaacctgggaggtggaggttgcagtgagccgagatcgtgccactgcactccacctgggtgacaaagcaagactccatctcaaaaaaaaaaacaaaacataatattaccaactctcataatgaaactagtataaccttgataacaacaacaacaaaaaaagacaaagacaatataaggaaaatgaccggccgatctccccaccctacctgtaaatattggcaatttcaagccagcaatacacaaaaggcgatgcatcatgactgactgagtgagggtgtgactgaagctgctgtaacaaaaagatctgaaaacgcagtggcttaaagaagcaaaagtgtatttctctctcaggtctcgagctgagtggtctggctctatgttgcccccacatggttccaggattgttctggcgtttttatttcctactccgtggggagaggggaaaatgctgtacaggataaatggtttagcttccaaggagatgatgcagaagttgctgacatcacttccatttgcacctttttcccccagacatgatcatagggcccactctgctgcaagggagactgagaaatgtctttagctgggtgaatgtgtggctagccccaatgctgggatctctgttattaaaaagaagcagagaacggttgcttagggatactcagcaatagtccccatattaactaaattagacttatctgggaatgcaaggagaattggacatcagaaaatgtattaatataattcacaacatttccatgggtacagaaaaagacattcaatcaaattaaacgcttaataatgataaaacaaaactgccgtttctaagaatagtagggaaacttctttcagtgacaataatatccaccaaaagcctgcagtagacatcaggttcaatggtgaaacattagaaacagtctctttaaaatcagaaataagacaaggttgcctgccagcactgattcccttcagccctgtaataaaagatctagacaagccaaggaattaacgttataaaaattgggaaggaagaaataaaactgtcacttttcataaatgataagactgtctataaagacagctgtagacttgttaggagcaaaatctttacgtaaattagaatgagaatttccatccaggtttctatataagttcaatatacaaaatgtgacattttccctacgtatgggcaacaaatagaaaattcaatttaaaaaatattagttataatggcactgaaagtaataaggtatcaaggaatgaatctttcaaaaaatgtgcatgacctttccggggggaaattataaaacttaattgaaagatataaagaagcaatataccatgttaatggacaggaagactcaatatataaagatgtcacttctccccaagttcctctagaaattgaatacaattctaatcagaatcctcacacagtttttcttggaacttgacaagcttattatgaactttatatgaaagagcaaagtgtcagtggtaacgataacaattttgaaaacattcaagagtggatgatttgctctgctgggtataaagatctgatatagaacttcagtagttggctgggtgcagtggctcacgcctgtaagtcataccagcactttgggaggtcaaggcgggcagatcacctgaggtcaggagttcaagaccagcttggccaacatgtgaaaccctgtctctactaaaaatacaaaattagctacatgtggtggcaggcgcctgtaatctcagctatttggatgctgaggcaggagaatcacttgaacctgggaggtggaggatgcagtgagccgagatggtgccgtcgcactccagtctgggcaacaggagtgaaactccgtctcaaaaaaaaaaaaaaaaaagaactgcagtaattgaggcagtgttttaccggcttgagggtggaccaagagtccaatagatggagaggctaggaaaagactcatgcacttatagactcttgacatgtgatatgatttggatctgtgtccccatctaaatctcatgtcaaattgtaatccccaacagtggaagtagggcctggtgggaggtgattggatcatgggggcggagtttgcatgaatggtttagcaccatccttcttgggtactgtatagtgagtgagtttttgtgagatctggttgtttgaaagtgtgtggcacctctcacccccttggtcctgttcttgccatggaagatgtctgtttccactttgccttccaccacgaggcccccccagaagcagatgccaccatgcttcctgtgcggcctgtgatactgtgagccagttcaacctctttttcttagtaaattacccattcccagatatttctttatagcagtggaactgtgagatgcgagatggcttgaccacagcttactgggcaaaaagcaggcagagctactcaataaatggttctggaacaatcagtcatggagataatgatgttaaatacatatcacacaggccaggtgcggtggctcacgcctgtaatcccagcactctgggaggccgaggcgggcagatcaccagaggttgggagttcgagatcagcctggctaacatggtgaagccccatctctactaaatatacaaaattagctgggtgtggtggtgcgtgcctgtaatcccagctacttgggaggctgaggcaggagaaccgcttgagccccgtaggcagaggttgcagtgagctgggatcatgccactgcactccagcctgggtgacagagtgagactcagtctccaaaaataaaataaaatacaataataaaaaaatacatatcacacaaaaactaaaaacagtcaataatctcaccacaccctaaattccgtctgaagtgtgtaaagacctactcatatttattttcttttttctttcttgagacagggtctcactctgttgcccaggctggagtacagtggtatgatcatggctcactgcagcctcgacctcccaggctcaagcgacctgcccaccttagcctcctgagtagctaggactacaggcatgcaccaacacatctggctaatttttgtattttttgtagagatggggtttcaccatattacccaagatggtttcaaactcctgggctcaagtgatctatgtgccttcatctcccaaagtgctgggattgcaggcatgagccactgcacctgacaagacctgtttatgaaaagcaaaactttaaaagaaaatgaggatattcgtcttcatgaaattgggggaaggaaaggaatttttaagtaagattcactccaaaaaacacaagtcattatgatgcagggcaggtgagcctccaaattggggcttagctttggaaggttcttgggttctctcaggaaggaattccgtgctgagctgacggtggaagaaaacagctttatggaggtggcagtgttacagctgcgcgagtgcccctgcagagtagggctacctgacgggcagtgtactgagagcagcagctcaggggcaggtccaccgtcatatttatacccacttttagtcacatgcaaattaaggggtggggtatttagaactttctagaaaaagggtggtagtttccgggctgttgctatggaaaggggtggtaacgtccgggtgttgccatggcaatggtaaactgacatggcgctggtgggcatgtctcatgaagaggtgctttcgcctcgtccccatttctgctagtcctcagtctggtcttgagtcaaaccctgcctcctacctcaattaggagagaaagtggaaatttgactacatgcagataaaaattgtgtctattaaatgtcacaacatattaaaagacatcccacggactggaagaaagtatgaaatgcctctagcaattcaaatgaaaatcagaatatgcaaagagcttctccaaataaatgtaagagaaggataaatactgggcctggcacagtggctcacgcctgtaatcccagcactacctgggaggcagaagtgggtggatcacctgaggtcaggagtttgagaccagcctggccaacatggtgaaaccccatctctactaaaaatacaaaaattagccgggcatggtggcgtgtatctttaatcatcgctactcaagaggctgaggcagaagaatcgcttgaacctgggaggcggaggttgcagtgagccgagatcacgacattgcactccagcctgggcaacaagagtgaaactccatctcaaaaaataaaataataaaataaaataaataaaataaaatagataaatgctccaatagagaaatggagaaaagtgaagaaaaagcaatttatggaacaggaaacacaaggtccagtaatcacttacaatgatgcttaataccactgggaatcagttaatataaattaaaacctcagtgagatgccaattcacacccatctagctggcaaaagtatgaagtcttacaggccaagcatgggctgggagtagacgaggaggcccctggagatgggcgtagcactgtccgttgaagtgcaagatatgtgtgtgtatgctaaacctcacacaccagcccaggagcacacggatgttcacagcagaatcgtttgtagtgcaaacattgcaagccacttacaaatcctggcccgggagatgtaggctgcagtgagccatgattgcactccagcctgggcaacagagtgagaccctgtctcaaaaaaggaaaaacgaaataaatatgagtaggtctttacacactttggacagaatttagggtgtggcgatatattgactgtttttagtttttgtgtgatatgtatttaatgtcattatctgcatgaattggataaataacatttcaatacattcatatactggaatatttaccagaaaaataactaaactggaactctaagttgaacatttcccagcacactgctgggtgggactgtgcctcccaaattcgaaggcctgtggtgaggaggagggagctgactgaccctgagtggccccagaacaagaggtagcacctctatgaggacaatccaagggaaggatttgggctgaaaatgaggaagggttttctaacaggccaggctagccaggagtgaaagagactgccccttaagggaatgagctccctgtcattgaaggtatgtaagcagggactgggcagctgcatcatgggcagtgagccaagcattgtctatcaatggcacaagggtgggttgaatacagatggccttaggccccttctaagcatgcccagaggcctcgtggttctgtgattcagtgagtttgcaaagtgtagtcaaaagaggatgggactaaatgaataaccaaatgtgacacatccctgcggtgggacactactcactaataaaagggacagacacaccatgacacatgtaacaacaagatgaatctcgaaaatatgctgtgtgaaagggccttggatgagatgccacaccgtgtgatgccgtttatgtgaaatcctagaaaacgcaaagtaatctacagaggcaaaaagcagatcggagcttgtgtgtgtgagctgggcggtggctgggggcgtggggagggagaaacagggagaggtgggctgcaggggggtgcaaggaagcttttcaaagtgatggaagtgttctgtgatgttctgtatcttgggaggttccatgggtgcatatatctgtcaaaatgaatggaattatatgctttaaatggatcacttattgtattcaaattatacttccacatagatacttttttttttttgagacggagtctcgctcggtcgccaggctggagtgcagtggtgcgatctcagctcactgcaacctctgcctcccgggttcaagccattctcctgcctcagcctcctgagtagctgggactataggtgtacgccaccatgcccagctaatttttgtatttttagtagagacagggtttcaccacgttgaccagaacggtctccatctcttgaccgcgtgatctgcccgcctcggctccgaaagtgcatatggatacttttaaaaaaagaactaaaaggcgaggagggctggagcagaggtcagtgccgctgcatcatggacttggtcacgtagacttgggcctgactgctgtcgtccaagtggcttcactcctccatctggccatcctgccaaccctggcctgtccacacaatcccaggaccacctgcagatgggggacattcccagagagtggttccagggctcctgtgtcattctcggtgtgggttagagtgcttcagggatagctttctgttcttccatgttttgtattcactacagtaccaagcccagagctgggtattcaggtggtgtatcattgatgcatgcagaatgaaggagagaatcaatggcttaagctaaggagaatttttgcttgggctgccctggagaagtggctttcttgggagggagggcagttgcaattttaggaccgtcatggccatgtacagttgagtgggttgtgtactgcaaaaaaaaaaaaaaaaaaaaaaaaaaaaggccgggcgcggtggctcatgcctgtaatcccagcactttgggaggccaaggcgggtggatcacgaggtcaggagatcaagaccattctggccaacatggtgaaactctgtctctactaaaaatacaaaaaaattagctgggtgcggtggcacgcgcctgtagtcccagctactcgggaggttgaggcaggagaattgcttgaactcgggaggcggaggttgcagtgagccgagatcacgccactgcactccagaccggcgacagagcgagactctgtctcaaaacaaacaaacaaacaaacaaacaaaacaaaacaaaaaacaacaatctctgctctagtgggtgaacgaaggataaaactcagtatctacactgctttccaagtcaggtggctgcacccattggctgtgcattcctaaagaagcgcattattcttttctcttcccttttttaaacaaaaaaatgttttattctggaagaattttagatgtacaggaaaggtgcaaagatagcaggagtgttcacatacattttcacccagtttctctctatgctaacatcatttgtgtaaccacggtatatttgtcaaaactaagaaattactattcttaacaatactatcaaaaatttcagacttgatttggattttactactttttccactgatgttcttattttatttttattttattttattttatttttttgagacggagtttcactcttgttgcccaggctggagtgcaatggtgcgatctccactcactgcaacctctgcctcccgggttcaagcaattctctgcctcagcatcttgagtagctgggattacaggtgcccgccaccacgcctcgttaattttttgtatttttagtagtgacggggtttcaccatattggccaggctggtctcgaactcctgacctcaggcgatccacctgcctcggcctcccaaagtgctggtattacaggcatgagccaccacacccggcctgatgttcttttttttttaaagctaatttaatcgtttaaattgcttcaagaagctgcatgtatagatgaaacacttgtttttttttccccctttaagaactagaaatgaattcttttaaaaaatgtattaaaaatttttaatttgtaattgacacataataatcgtacatatttatggggtacaatgtgatgttccaatgcatgtatacaccgtataatgatcaatcaaatccaggtaattcccacatccatcacttttaatatttatcatttctttgttgcgacatttgaaaccttctcttccagctgtcttgaaatatgcacgagattgagatttgctgtagtcaccctactgtgtaacaggacaccagaacttactctttctgtcttactgaagctccacaaatgttctttttctgttccaggttctaatctggggtaccgcactgcatttaatacattattattattattatttaaattaacacagaggttgccccgtggactagcagtggatggaaaaagaaaggggcatagagaagtatccagaacaaagtcctcaggtggcctgtgagggaggaagccccagggtggtcacggggcacacctggcctctctgacccacagtctcagcacagcgtatgcaaagtgcagaggaaagacaccggtttgctggtagctttaacagttgacttgcccagcgcttgaggaagttgcatttccctttctgtaaaagtcaatgttgtgaacccagtaacttgtgtgaattgctctgaaaaggttcagcctccgggtgcctggtgggaatcctgcgctctgccagccagcaggccctggccctctgcaccctcctttggagttcctggcttgtcccgagtgacgagtccggggtgggtgaccagtggctcttcctctccccgcccctccgtcccttccccccggagctggaaaggtgtgtgggtggggagtgatagcaatgaacagtgaacttggtgccaactggggtggtcgaatattcacccgagtccacgtggagagccctcgtggcgaagggagcgccctgcaagctgcagaactcaggttttgtcccttcaaacagcagccggagccaatagctgcagcttggagaagagcttggagtcacctgagcctagggctggtttcaggctaggtggtcaaatgacttctcagaccctcagttttcgcatcagggaaatgggccacagttctagctccagggtgcctggtcccccagggcggcctcagaataggcttggctcctgtggggcactgcccgccacttcccctcaatgtgcccttctccatcagcggaccccaccttcccttcctgcctcatcgccccacatcctcccacccagggactcccacacaggcccttgcctgggggagcctctgggtcctggctcaagcaatctccccccacctggagttccctctttagggcgcacgtttcaagagccagctccaatgctagcttgcaggcccccagctctccatctcggtaaccctgaggtcctctctgtagattcccccgttgcctcaatcacttcctgtctctgttatgatctcccatgatgaagtcatgcctccctctctgcaaagggtataaactccagggaccagctgtctcttgcatcctgggatcaccagcacctggtactgtgcctggcacacagcaggcactcattaaatgctctgcttagaattgaagtgcactgaattcttggaaccctcaagttcttggagaacagcctctgggcccgccccgtggacaggaagtgagcctcccagcacagagggcccccaggtctcctgctggagcctccacgcagggggcctgtggggatggccagggctcagcccagcacctgagcgcccctcccaccagctgctctgccagaccgcatgctccgccccctgcaaacgaccgtggggagagcagcttgagtaagttccccttccgtttcctcctgccccaccaccgctgctcctcagcaggcgcctcaccagcctccacaccccttgcgcccgcagaaacgcgcctggccctgagctgtcaccaccgacactctccaggctccggacacgatgcaggccatcaagtgtgtggtggtgggagatgggtaggtacctggctggacttcctcacagcccccaactgggatgccctgagatccttccgccctggtgcccctggggaagcccctggccctgcagaactaggcgtccctggaaggcagcttggaggggacgcttccttctccgagggcccacagggagcacccgggggtgggctgaggggagcttcaccctcttcagccccaccccaccccagaagccatctcggtggagggtgcaggactatgggtgagagtgcccagggctcctcacctgcaccccaaaagctgggggcaggtctcccacggaggcaagcctcagtctttactctgtggatgcaggagggaagtgggaaacctgaaattcagcctttgtccccaggctgacctgggctgtcgtcactggcttggtgccgctgtgtggccttgggcaagtcacagcacctctctgaacctcagcttattcatctgggaggaggcctatgccctggggatgctgtggggtcgcttgagataagctgagtggctgtcttgcttgtagtatgtgccttctagcaccccctccactttctctcccctcccctcagcctaccgggttggggaggatgtgtgggggatgtgggtgaggagcagaagaggcaaggggacattgagagacagagagggaaggaggaggctaaaggatgggagggtgattgtggggtcggcaggggaggggcaggctgggctgagacccttctcagttgtcagatcccagtgacttcaggctgtcttgtcccctgggggcctcagtttcctcatctgtaaaatgacaggtccaggccaggtgcagtggctcatgcctgtagtcctagcattttgagaggccaagatgggaggattgcttgaggccaggagcttgagaccagcctaagcatcatagcgagaacctatgtctataaaaaaatttttttaagccaggagtggtggcatatgcgcctgcagtcccagctactggggaggctgaggtgggagaatcgcctgagcccgggagtttgaggctgcagtgagctataatggtgccactgcagtcggcctgggtgacagagcaagacgctgtctcttaaaaaaacacaaaataaaaggacaggtccaatttgtcaatctgtcatgcctgccagcagccacatcttagggtccagcctacaggctcaccctggggcatgttctagctggaagggggcctcctgtccagccttcccattctacagaggagcagcccaaggctttgagagactcagctctcctggcctgggccctgtggccccgactttggctgtgacccatctaggtgggggcgggcccatttgtccaccagcctcagctgattctgatgcatggctccttatctgccctcgcctgccccagccctgttcacttctgctttgtatctgatcggaggaggggcgggcggaagtcaagggttaacgttccagtcattcaaaattacctcggtggcaggcccaggggagggcgatggtaggaggagaggatgagctgtcttctctgagcaggaagtgacaaaaccacgcagggcaggggaaggcccagagctgtcccttggcctctgggcttcggctgagctacctgcacccgctcccagcctcgcatgctgagggtggaggaggcgcgcgttatcacttccttcctatgtaccagctctggggttaatctagccttctctatttatcctctcaccaaacctaataggtccattttacaggtgggaaaatgaaagttcagggaagctaagtaatttgcccaaagcctcacaggatttgaacccagaccactctgactcaaaccctgacctggtaactgctctgctccacgggggaggtgagagggaagagcagggtcaggtcttccctagcagccatcggctgctgccatgcatcaggccctgtgctcagtgctttgataggcctcgttggatttactcctcagcacactcctatgaggatgggctcatctctattttctagatggagaaactgaggcagaggcaggttaagtgacttgtccaagatcataccactggtaggtggtacagctgggatttgaagcccaggtcaggcgtcgggggcccctcggcattgcctgggtctgctgggcaccctctgtcccacatcactggcccctggagaagcctgtgggaaaagcggattgccagctctgcgcacacctgtggatcagaatctctggggctggaccctgaagtctccactttaacaaacatccacatgacttgcaggctctcgggtgtgagaacacagacagggggcatctcacatggggagacggaggcccagagggctaggctgggtggatgctgaggtctttgcagaggaccaggcagaaacctccccacgtctccggcagagcccatgaccgccgccctcttgcacttcctgtctttcagggccgtgggcaagacctgccttctcatcagctacaccaccaacgcctttcccggagagtacatccccaccgtgtgagttcctggggatatgtggggtggtgggaggaggggagagaccgtcaccaagtcgacccccctttcaggcacttcctgtgggccagaccctgtgtgggcacccacagcctccagcccagtggagctgcctgacagtccagccaagaaggcagcactggcgctgagaggtgctgggggctcccagaacccgggatggggtatggaggaaggggtagaagggaggaggggtggcctttaggctgggcctccaagcaaagggacgtggaggagaaggctggctcaggcaagagcaggagctgggagaggagcttctgcggaagcaggctgctggaggaggtgatccagagagcctgactccaaggaacagggacacctggggacaaggcatgctgaggggtggaacagagctgtctgcaggcctgggaggccctgcgctctattgcaggatgcggaggcagggctgtcatcggacgtggagggagcgtgttggtgtcagactcaggagggaaggatgactggggaggcaccagcccctccctggccagccctcaggggtccccatcactcctaggacatttccccgactccctagcatggcactcaaggctcctgatggccttcactcaacctcccacctggccttattacccattactttgcttcacactctgcctcctccggaccctactgttcgccacaagctccctgcacatttctaccccagggcctttgctcaagctgttctctctccccatagtgctttttctccccacatccacctgtctaaagcctccaggcgcagctccagtgccccctcctccgggaagcctttctgatctaccacgaaggggtctccactccccagagtgactttatctgatctctcccatgactatgagcctgtggagggcagggagccatggccagctctttgtgggtctcccattatctcagcacagtgtcttctacatggtatgacacatgcattaccttacacacaacacatgtgttttgagttgacctgacttggacatcgtggaaggaccacaggaagatcgatcatagccaccatctagcaaaggcctgccacatgctggcccctgcgcaagatgtcacacatgtgtgatctcatttgatccccctgggagatggctattagcatgcacaggacacccatggggaagctgagcctcacagccactaagaggcttgcctcccaggcttacacggtcctgtccagcttcagagccaaggtccatgcagaacctcgctggggccctcatttcttgatcttaatgaacccccctttcaggggcagggatcaggctctcctaggaagaggagggcaggcagaagggagaagagagcctggagccgagatgcttccaacccaccccagaggattcctcactacccaacccccaaccccagacttgggtgggctgggctctctctgctgctgtctctccccgggacactctgctcagctgccttagatgccctggcccaggctagaggaaggcaggcagccaggagagggcagggaaaccctagcagagagcctagaaagccgcttttgccccagctcggtcctgatgctggtgagtgcccctctctggtcctgtccttatatacaaaatgggaacaaggattcctgcccactcaccatcaactatcaaacgtttatcaggtgcctctaagtgccaagggagggctggctgcaaacctgagcagggagggagaattaggtgaggcagctcctgctcaaggccatggtcaccagcagtgtgttgtcactgcctctgtccctgggtctctggatgctggcttgagaccttgtcccgcctttgtgcatcttggctgagttgaaggacccacttgctgaaggaccttggaccaatcacttcccctctctgagcctcaatctccttttctataagaggtagaggcttggaagtcccaagctccttccccaggcacctcccttgtacgttgagatggatggctgaggctgctgaggccaggttatggccaggtgctctcagcagcctggaggtccctgatccctggtggcccctagtggactttgttgtcctggacaacatcacagaagctggagaaataggcccgaccagatctaccttcccaagtctctccgaaggattgggtgaaggtatcccagtagggccagctctatgcgtgtggccacctatccaattgcacagggccccatgctcagaagggtcctgcaccttgtttaatactctgatgtctacatcttgaaattcttaatcatttttgagcatgggccctgtacttccattttgcactgggtcttgcaagttctgtggtgaatcctgcctcacaccctcatatggcttcaggcacaaagtttctcagccccagacgagaccccagagcgggatcctgctactgccaatgcctgtgcccctgtgaagggagggtaaaatagtcacactgggcccttgacattggagggggaagagggagagaaggtgggttgggaaaaacaggcagccccaaatctctggcacctgagattaaggtggagagagcttctgggctgaggatggtaggtttgctgggggttggggaggcccctgctgcagatacaagatcagataagcctgagagctggctccccatgctgccagccatgaggggttaacagcaaagggatggacctgaaccttcggaactgacaccttcctgagcagccaatcagttgccaggactcgtggggctgcaccgtgattggctcttgccgcctgctctgttgtatagaccctatattggagccggcagggccctgtgagttctttgcatcaaatcccccgtttcgcagatggggagcctgagtctgctctgtggatggccccgtgctaggtgttggggatacagaaacatggcaggaagacagtgccctcgtgtgcctgtggcatagaggggcgcccccttacacctcacctcgttagaaccaagctcgacggaagccctggtgagcttttaaaactgaaagttaggctgggcgccgtggctcatgcctgtaatcccagcactttgggaggctgaggcaggcagatcgcttgagcccatgagttcgagaccagcctgggcaacatggagcagaaaccccatctctacaaaaaatacaaaaattagccgggcatggtggtgcatgcctgtagtcccagcgactcgggagactgaggtgggaggatcgcttgagcctaggagggtgcggctgcattgagctgtgattgtgctactgcactccagcctgggcaacaaagtgagaccctgtctcaaaaaataaaataaaataaaaagagcctcccaaaaaacaactgaaagttaacctggcctaaatctctcctgtggctcccttcacacttaaaactcatcttaatgcgcaaaccgtgaacaacagcccccgtctccccagcctcatttaccacaccccttacccacttcactccaagtacacagactgccttgatgatctctgcctcccccgaacctcttcactcccctttatgacacccagaaccctccctgcttcctgtcattcagttccctgcttaaacatcgcctccttgaccccctgtctacagcagccccccgtctccaacctgccctctccatcccaccaccctgcttggctgtcttcataggccccccgacagcccgacttcatcttgctgctcctttgctgccactcctcctcttggatggaagctccctgaggacggggcccttatctgcctcactccctgccatcgcgccagtttctagaacagagctgagcccattcctgttgctccgtcatgactgcctccccgaccccggggaggaaggcagggctcagctctgcatggaagaatgtgtgctgctaattgaggttgaatcatttggcacttaattttcactttcatttgaaatcctctcttcggtaaactggcgaatccagcctgggattccagtggacaggatgacatcagcctccctagctgtgtgcgccaggccccaccaggttctgcctggcctctcggcagccccatccctgctcctgccgctgtgtgtgtgggtgcctcatgatgtccagtggctcaagcctctgccttagctcaggcaccccttctgttgggtattctgttccctcctgctccacctctccctgccccgtgacacctccagctgccttcatctttcaaccaatagcacggtaagggcctcccctcctggctgatgtgccagtttccccctctgttcccctctggcccctccctaagacttctccaagagggtccctccctccctccctccttccctccctcccttcctccctcccttcctcccttccttccttccttcctgacggagtctcgctgtgtcaccaggctggagtgcagtggtgcgatctcggctcactgcaacctctgcctcccgggttcaagcgattctgctgcctcagcctcccaagtagctgggactacaggcatgcaccaccacacccagctaagttttgtatttttggtagagacagggtttcaccatgttggccaggatggtctcgatctcttgacctggtgatccacctgcctcagcctcccaaagtgctgggattacaggcgtgagccaccgtgcccagctgggaccttttctaaatgcaaatctgatctcatcacctctgcctggcttggccccttgctggttccccattgccctgagaaccaagacctgactggtccgtgcccctatgacatcaatcctttctcacccccaagtcactagccatgcgtgccctgtggtctctgggttccttgaatgcaccatccttcctccgtgggggtgggcttcggtggtggtcaggtgatacctgggtgctggggccccttccacctgccccattcccctcctccactccattctagggccaggcctcagagttctacaggcactagatgaaaacatggtctctgctctctccaactccatttccagccatgaaatagcagcgatgcttaccatgtgggcctttctgaattgggtaacaggatctagccttgctctgccacccactggctgggagatcttgggcaagtcccttcctctctgtaagcctcaatttcttcatccggaaaatggggtgagggttgcccatggtggtctgtgcataaggttcctctctggtcctggctgcctgtgggtctcttaagtaagggggaccctcaggggtgtcacaccattgacacattcctgcacctgtccctctggtcctctggggaggggccctgtggcaggggcatttggggacatggaaaatgagactgcttagcttctcagcatctcccagtggggtggcttgaacatcctctgtttttttggattctcctaatggctccaagaaataggtattttcccctccacattaaagagattgaggctcagagaagttaggtcactcacccagggtcacacagccaggatgtcctggcttcccaaggaactctgtgttcccgcccaacaagaaaggtccttgacctcttcaggcctcagtttcctcatctgtctaatgggggtaacttaagatccttttgtcttggatcacatgagacttcaagacctaacatacaaagaccctcagccccctgcctggcctcagagaaggtggctgttgcttctcaaggtcccagctctttccccatcaccgtggccctgagattccagggatgacccagaggagacaggtgaatcttgtggggcttcttggcactagcactgtggctggacattagaggagagagtgtccaagcatttcccaaaagtgtgtttctggtcaaaactggaaaaacaacacaggtgtggcttttcccatcatgcctcactgtgtctccctggacagcgccttcttcctgaaatcccacagcagtgtaggtggtacccagagtaggtgcacgccagcacctgctgtgcaccagaccgcgggctggccccagggtgcagcggcaaacaaatgaggcttagtgcctgccacctgggatgctgagttccccaaggagtgctggtttaggtggggtggtagccccgacatggctggaagtcaggaaaggcttcttggaggaggtgacattgagcaggggctggagggatgagtaaaagtcagccagcctggcagtggggaggaagagaagggagagaggaaggagagtgggaagtcaggggccactgtttgcaggcactttccagacaggcgggaacagggccgtttgaggaactgagaggtaaccaggaattctgtccagggctggacaggcaaagtgtattaaaaaggctgggctgcccactttttgggggtgtgggggactcctctcaggagaggtgtcttttgtgttactctgaagtgttagcgcttctgcagcctaacattgagtagcgttctctgaggacttcctggaggaggtggtttaattcccttccacctgcattcactgggtgacaggcctgagactgtggagaataagcaggcatcggcctggcccacacagaacccacagcccttgaaggggtggagactcaccaagtgcctgctcgtggtccaggcaaagtagtcacctgagagagggaaccatgggctctttacaggtagaggacgacgaagctccgccagagaggaggacttgtctgggcagggttttgaagcatgaatagaagttgggagtgaaatggggctggaagcgtattccagagggagatacagacaggatcaaaggcttggagggctgggcagcctggagggtgtgggggccagagaccaggttggtgagaacatatggacagctaaggtgggaaggacattctgggcaggggctttgtgtggaccagcacagggaggtgggcagtgtgagcctttcccgggaaacggcttggctggtgtgcgaggggaggagtaggaggagaagtcagaggagccggaggtctcagtggaccaggtcagggcctgtgtgggggaccacagcgggaaaagtgacagtgattccctaaccctcaggggcaggcggtgagggcattcccggaggcacagctgtggcctggggcagtgagcactggtcgtggtcactggtttctggtttcttacctagttgggtcactcactggctgtgtggccttgggcaagtcactgcatctctctgagccaagttttcccttccacagcgtgggtagccagcaccttcctcgcggggatgtgtgtagcaagaactggcttgcaaaacctcccctattccgagcttggagccctgggatggccctcccagcattcgttgggcttccccgtctctgatatttgtcaggcccctcaccccgtgtctggccttccgccagctgtgggggcaggatcaggcatgtactccttggtggccccagcgctggctctgcacccgatgcatagtaggtgcctagcaagtgcatctggaggctcgttcgatggccctgcagggctctctgggtctggcgggagacattgggagtcaaggtcagtgcctcacaccatctcctcggcagcatgtgtctttctaccgtttgccgtggcccttcccatggccagtgactaacagctttcacgcacactctggggtgggctgaaaggccccggaagcagccctctttccctggaagatgggagatgaatgacagcaccctagcttcctgccttctctggggacgccctgagcacggtccgttctgtctcccaggtggccccagcaggactgagagcagcagcagtccacagccatgacaactcaaccacctgccctgtgtcagctgctgtcccctcctttattcctccccactccccttctgcagcatcctggagtcacttcccgaataaacccctcacatcacctccttgtctcagggtttgcttctggggggacccagcctgagacgggatgaacattcattcgacaaaatattgcggctgggcgcagtggctcacgcctgtaatcctagcactttgagaggccgaggcgggcggatcacttaagttcaggggttcgagaccagcctggtcaacatggtgaaaccctgtttctactaaaaatacaaaaattagctgggcgtggtggtgcatgcctgtaatcccagctacttgggaggccgaggcaggagaatcacttgaacccagggggcagagtttgcagtgggccgagatggtgccactgcactccagcctgggcgacagagcgtgattccatttcaaaaaacaaacaaacaaacaaaaaacaacaaaaagcaaacattgagtggcagcatagggagagaggtaagtttattctcatcaagactgggaggaaaagttacacagcctcaattacctttccaaaggacaggtacgggtaggaaaaggattaagagacaatctttttttcttcttgttaacttgtattacatttttaaaaaatataatgaatcagtaatgaaacaaataaagaaacccaattgcaaatgctgtgtgactttgggccagtcgcagactgtctctaggtctcagcctccgaggaatgacatggagctggaccacaattcccaggttctggggtttgagattgaccttacctccgccttgcctgctccccacaggtttgacaactattcagccaatgtgatggtggacagcaagccagtgaacctggggctgtgggacactgctgggcaggaggactacgaccgtctccggccgctctcctatccacagacggtgtgctgctcccacctgccttgcagtcctgacctttgctgtctctgttccctctgcttgggatgcccttccagccagctcagcctgggaaaccctacctctccccttaaggcccagctcagggagtctgcctgccttgcatgtcccaggcagagaagggcttcctcttgcactccctcagccctgcattggttcccggtcctcaatgtgcccatcttcccaccccattgcctcctgggctctggcaccccctgtttccagtggtggggcaggtggattctgcacagggccccaggaggcagcccagcatggtgagccctgggagtgctgggggaggggagaggtggaggatgcctgcaggtggctgctgggtcctcgcccttcctccagggtatgcagggaggcggctaaggccggtaatcagatggtggatagtatatggattggagtatggactctagaatcccagatcctcccctcaccagagtgcacgttggcaaactctttaacctctggaagcctcactttccctgtctgaggaatggggctaccagcagtgcttgctgcagagtgacatgtgaggataaccacttcgcagaggccctggcctttagtgagcgtcctaacaaacagcagcctcgtggtagaggcgagaagggtatctctgctctgcccagatcctaagtccccagcattccctggggtgttccaccctcagggagccccaagctccacctctcggtggctgccatggtgggacacctctgggccctcctcactagcaaccctcgcttgctctgtccccaggacgtcttcctcatctgcttctccctcgtcagcccagcctcttatgagaacgtccgcgccaaggtgagctggacagggtgggccttgggggctctggggcaggtaaccctgagggacagagggaggaactggtgactctaggctggtccctggggcagcagaggtcgcatacagagagggtccccagtgtcaaccagggctggcagagggacttgagggggtaagattcagaggacctggggtggggggtgctgcgatagttagctatacccccactttccatggctgcattctcctcctccccacacaacctcatgtccgcctccgattgtcacataacctcatgtttgcttcttatgtctgcacaaaacctcgcctcctcctttcctacaatcatgcgccccctccttcctgcacaacgtcgtggcctcccctccctgtgccacctcacgtctctctctcctcaccgtcgtgcccacctctgatcttctggcaacttgctgcctctcctctccctacaccctcacactccctctgatccccgcacagcctcgcgccccctcttgacccatacaaccttgtgtccccccacccacctgcccagtggttcccagaagtgcggcaccactgccccagcacacccatcatcctggtgggcaccaagctggacctgcgggacgacaaggacaccatcgagaaactgaaggagaagaagctggctcccatcacctacccgcagggcctggcactggccaaggagattggtatgggcctcgggctcagaggggggatctggctgcgggggaggccctgacttggcctcgtggtgtgattgtaaacacgggctgcagggccaggctgtgcagtttgaactcagctgtgctgtgcacttgctgtgtgaccttgggcgagtcacgtagcctctctctgcctgtgtttccttatcagaaaagcatgggatagtgatagctcctgcctcctggggtggttgggggaattcagtaacttattccaggtggagctgccagggcagcacctgtgtgtgagaagcactctgtgttagtagtagtcgtcctagtagtatgagtagtatctattaatagatactgaaaataaggaggtgtgctttgagcagacagaagcagagattgagtgggggtgctgtggttgcttggaggacaagtggcaagtcaaacttgggtgttctgggaaggcttcctggaggaggtggcgctgcattagatctaaagggtgacacatttccttccaccaccttctctcctccctttccccactccctttggtttctcagctcgacccctctttgcctccaaatcactgggctggagaaatatagtaacttctcaaggtcacccagctagtaggtggcccagccagatttgaaggaaggacagcaaattattggctcactgctggggggtgcttctttgtagtggctcagggctgcctgcatcagggaggcgatgaccatgggtctggcttcatgcatggtacccaggcctgctggctgttcctgtccctgtccctggtaggtcccaatgtgtctgtagctcagggatccttgcccaaaagcccaaaaccaccagctgggtttggtcatatgagctgtgccctctgcctcaccacaggactctgcaggcccagggtttggcccccaaattgaatccactagacctcctcccgccccaccgccccagccccgccccacctccccctgccggaactgggagggccctggggactcacatctcttcacaggaagagaaaccgcagccaccacctccctccttctgtgactagcgtggtgacacagccatcttccccgggggcctcagactatggctcacaccctggctcccttcccctgtcctagggccacagctccccagcctgcaagtctttccttttaaatatcaaggattcatccctgccttctctttctgaccaaccagcacccctccaacccctgcccctggactccttctattcagggtgcagctctccagcctgtggcctggctgtcactgacctctcccttgtaaagcacatgctttgggatcatgtggagggtgctggaggcctggattctggtcctggctctgatactgattggctgtgtgaccttgggttagtggctgcccctctctgggcctcagtctccctctccacataagctgacctggacaatccccaaaggccctctctcctccataaggtggtgactcagagttcttgccttggcctctagccagtctttcctggctgaccctgcatggagctggggcaggggcagtgattttaactgtgcctcagaccagcttaggcctagggggagtcctggggggactggcagggatagtgagggaagcagcaactgcctctgcccacctggactccccagccctgggatgacaagttttgggggcagccctgagcccagctgataatcacagctgatgtggactgagcacttcctgggagccacttcattctcacagcagctatgacgaagagctcttgtcaccttcactttacagagaggaaacaggctcggggggacatgttgctggcttaaggccacccagccaggattctgacaggggtggactggctccctaagccacaaagctgagggccatctgtcctccctgcacctccactgcccccaccgccccctcaccctccttgccctctctgtagctcccctgccccctgcctcagcttgatgagccatcgcatggcaatgagtcctagacagatgggagactgaggcccggagagggggaactgactaaagtcctagagcagtgagaggccgagccaaagtgagccctggccccccagctcaggacccttgtcctgggtgagtgggtggctgggtgccagggaaaaggcagttggtggatgtgggggaagtggacgcagatgtggtcccttataaggagacagtggccaagtgcccagtgacacctcctcaacacagggggctgtggtgaccagactccgggctgagcccagggcaccctgctcttgccagccaagccccatgacaaccactgcccatgatccctggtgggcgtatatgcctccaggtagaggggagacgcccagcatgtgactcagagcgagtgacatcctctctgagcctcaggctcctcgtccctgccccacccttcctttctccccagcacctggcctcagtgggctcccctgttccaggggctgcccctcctgccatcccgacttctccccccagctctgtgccttcgggccttggcttccccactctgggcctgtttcctggtctgtgaaatgggaactcaccccggtgttgttggaagcacccagctcagtgcctggcacagggtaggtggtgaccagcgtccatccccttccatcctgccacagagaagcaagcgggctttggcggagggcccagagttcccctcccctcccttctccttcctcttggttctgacatcggcccccaggcctgcatagcatctcggcagaaggggttttgtggtttttcacttcagggaaactgtgcagcttgaaatggacatgggaagtcacacggactctttgcagaatgtcatggaacgccgtccctgggggtgggaactaggcctgcctttctcctcatctgtgccccgggctctagccctgaggggtcttcatgtgggagaaggctgggcctcccatggcaggacagaggagctctccaatgccactcctcccagaaggcccccagctgggcccaggttgagggaatacatccagcgtgtgagtttggatgagtcgcatactctccaggagcctcagtttccttgtctgtaagacagggacggtgctaaggaaggggctgatgatgttgggaagttcctggggagggggccctgagggcttcaggcctcctggggattatttgcaaccctgggagaatcctggagggatgggcaagacaattttctagaaggtgaggctcccagagatttggtcactgatgcttgagccctttccttcacagaaaagcatcaaaattcccgccctccttccacggactaagggctatgtgtccaagaaagacacagacctgccctggaggccttagtctctcactgagttcacgctcgctattacagacatgaggaaactgaggcacggtgacgttaaactccttgctcctggtgacacagcctccaggtgaccccactgggactggatggcggcccccagagcctggtgttcagttgtatggcttgggagggggtgtacggcatggaggggtgtatggcgtgggagggggtgtatggggtgggaggggttgtatggcataggaggggtgtatggcgtgggaggggtgtatggtgtgggaggcgtgggaggggtatatggcgtgggaggcatgggaaggggtgtatggcgtgggagggggtgtatggcgtgggaggggtgtatggcatgggaggcgtgggagggatgtatggcgtgggagggggtgtatggcgtgggagggnnnnnnnnnnnnnnnnnnnnggcgtgggaggggtgtatggcgtgggagggtgtatggcgtgggaggggtatatggcgtgggaggggtgtatggcgtgggaggggtgtatggcgtgggaggcgtgggaggggtgtatggcatgggagggtgtatggcgtgggaggggtgtatggcgtgggaggagtgtatggcgtgggaggggtgtatggcgtgggagggagggtgtatggcgtgggaggggtgtatggcgtgggaagggtgtatggcacgggagggtgtatggcgtgggaggggtgtatggcgtgggaggggtgtatggcgtggaaggggttgtatggcataggagacatgttggcccagaaccccccccgccacttaggccttggctctcctgtccatctccccaaccagactcggtgaaatacctggagtgctcagctctcacccagagaggcctgaaaaccgtgttcgacgaggccatccgggccgtgctgtgccctcagcccacgcggcagcagaagcgcgcctgcagcctcctctaggggtaagagtcccccactctagtgcccaactcccatacacagcaggccctggctgagcagtggcctttggttcactgtgagtggcatttaggccaggacagaaagaaggtgggtatggaggttgcctcagtttccgcagcctacttgtcatctgcctgggccagtctcactctctggagctcatcttccagaggcaaggcccaaggtatgaatgaatgcctggtaaccccccacccccgggccagggagtgggtgtcacggagccccactctgcccattcctgcaggaggtgatggaaaagatgccttggtccctggccctaggagagcccagtcgagccagggagatcctgcacccacatatgtgggtggaggtgggagagcctgagctatgatccccagggggcagatggtggggtcagtgagttggaggcagcccacaaggcctcctggaggtgtgggaccagaaggacagagaggactggtgaggtggggagagcagcattggcagtcctggtgggagtcaaaccttgagcaaagacctggaggtgggaatgagctgtgagccaggaaggcgagagctgtggattctgcatgtccccaaattctctttccctgcttatcttccttccaggttgcaccccagcgctcccacctagatgggtctgatcctccaggatccccacccaaagcctgatggcaccccggctggccatgctgtcccctccctgtggcgtttcttagcagatggctgcagagcttcgttgatggtcttttctgtactggaggcctcctgaggccaggaacgtgcaaatttgcaggtgctgcatcccaagcccctcatgctcctgccttcctgagggccagaggggagccccaggacccattaagccacccccgtgttcctgccgtcagtgccaactgccgcatgtggaagcatctacccgttcactccagtcccaccccacgcctgactcccctctggaaactgcaggccagatggttgctgccacaacttgtgtaccttcagggatggggctcttactccctcctgaggccagctgctctaatatcgatggtcctgcttgccagagagttcctctacccagcaaaaatgagtgtctcagaagtgtgctcctctggcctcagttctcctcttttggaacaacataaaacaaatttaattttctacgcctctggggatatctgctcagccaatggaaaatctgggttcaaccagcccctgccatttcttaagactttctgctgcactcacaggatcctgagctgcacttacctgtgagagtcttcaaacttttaaaccttgccagtcaggacttttgctattgcaaatagaaaacccaactcaacctgcttaagcagaaaataaatttattgattcaagtttggagatatcgtgatttcaggtgcagcttgatcaagggattcaaatgatgtcatcgaggcttgtttagctctgggctctgccttctgctggctggttcattctcaggcaggcgacttagggcttcatcctcccaagttcaagttcagggttcatccttccaagttcaagttcagggcctcatccttccaagttcaagttcagccaaaaagagcaaatgtctatcccaggcaaagttctaactaagatttactgtgattggaccagcttaggtcctgggcccccttttaaccaatcatatttgtcagagtggtgcagtgctgtgctctgactggccaggcatggaccatatgccatgctggaacagaactgtggcaaccccagcgaaagtgtgtgtactgggggggagggtgagttccaaagtgggctgagagcctggtgggaatttgggaatttgggcgagaaaccctcaacctccactactggaggtcatgggaaagtgttcatttcagcagtgacatgaaacaatgctggaccccgaaggtgataagcaaaggggagtttctttaaaagagaggcggggttgttgtgaggatttaagaagttccgacatgggcacaacagtgcctgcacagtcagtcccacctcaggacttgctaagttctgtggaggtgccagacctccccctcctgcggacaattactctcctctatctcaacttctcactcattcatcaaacacacatttattgagcacctcttctgtgcctggcactgttctaggtgccagggatccagcagtgctcagaagtccctgccctcaggaggctgacactctagagaggctaagagatctaagaggctgcccctgacaacccagaagaccccaatttccagcccatgaaatgcttgagtttccacattgtgctttcccagagctcccagccaaccccactatccccattagtccccatgttctgaggcaggaccccctccagctcactcacctcctgggagccccccttaaaagggattaggtgcagaggggaaacccctttgcttttcttagtttcagctcagacaaagtcatgatgttttcaaagttacttctcttctgaaacagaaaggaaatactaaaccccacccatccatggcaccatacagatgcaggcggccaggaccccactccctagtatgttcgatgtctaagatccctgaggcaccccctgaggttggccagagtctgagggagcctctttctgctccctcctcttcacagagccttgggataaactccagagcctccgcaacaaaccatggccctgaaggtctggccatcctctgcctcccactcttattgcactcgtgcctctaccatcagactggactgtcatttcttccactccacattcatgcttctttcattccaggcctttgaacatactggacccctttcctttgctcctggaacttccctgcagggcaaaggtgggcccggatctccttccatgtgtgttcagcccgttaggtcgaccccagtagagacaatctttgcttctatacgataataatgtcagtaaataacttcctttactcattgtcttggctcccatgcacatattatctcatttaatgttctaatagccttccaagataggtactcttagccacggtttgcagaagaggagatgaggatgcgggagggcacaggtttggctcaaattgacaaggcagacactgtcctttcccaccctctccctctgttcccaccctccttgctaacagaatcctagttttgtgcatagcagcaccgtacctaacaccgacaaaatacttgtttttccagctggttttgtcgctggggttttcaggccacatagttctggccgagaagccgatgtgaatgaaagtcagcgggagagatggcttctgtgaaagttgttttcttccttaaaaaaatgacaggcccaggccgggcgaggtggctcacgcctgtaatcccagcactttgggaggccgaggcgggcggatcacgaggtcaggagatcgagatcatcctggctaacacggtgaaaccccgtctctactaaaaaatacaaaaaaatagccgggtgtggtggtgggcgcctgtagtcccagctacgcgggaggctgaggcaggagaattgtgtgaacccgggaggcggagcttgcagtgagccgagattgcgccactgcactccagcctgggtgacagagcaagactcaaaacaaaaaaaaaaaaaaaaaaatgacaggtgggatgtctggagctgcagcagccgtcttgtgagctcgaagccacaaacatgaagatacaaggccccgtgctgagaggggatgagcagaaagataaaaagagcgtgagttcctggcagcagcagtgggcagctgagccaatgctaacagctgccttgttatgggaactgaagaaaatgaaaccacccaattgttaatgtcactgttggtcacaccttttgttacggtaagctgacagcatttgtcactgaagcggtaggactcctagcgcagtgctcttcccactgtataactgttcccagcagccactccaagtggggtgagccacttgtttctgctctgcaaattggctgaggatggaggcccctcatataggaaagagaaagcttatgggaagtcagtgagaacctgttttgaaacaggaagacctgccggttgtgggcaggagctgacaccatggtttgctctttcatgtgacaacaacccctcccaagtgcccacctagtgccaggcctgggctggcagcaggttccatgcctcacttcgccccttcttgcaatgaaatcatggcctggtggttgaggaaagtgcctgccagacaaggccacttcatctggtgctttctattctagagactggctgttccttgtcccttcttcaaagcggaggcctggggtcccccatactcctccgatcctttcaccctggcattcactggccaccaagcttggacaattcagcctctgtctattaaatccaccccttgtccccacggctgctccctaacctaacccctgccatgtctcccctggacagtagccacagcctcctcactggcctcctgtcttccctctctctgcctctactccatttgccaccaggtggcctggggattttcctcgtttacaaacaactgtgcagtcaaaaatgctgatagaaccacagacttattcaatcatcgaatccttcagcaaatagttattgagaccgtgtgtcaagcccaaggcttgggggtgggtcaagcatgagcccgctctcaggagctcacaggccagtggggaggctgtccagccagcagagagccccaggaaatggcccttctgcttggatgtctcctgagcatttcaaactcacacgccccgcccagccttcatcactcagtaaatgcatccaggctctcaaatcaaaaacctgggagtcctccttgacaccttctccctcaccttccacttccaacccatcaccgacaatctcctcagtgccccccttctctgcattgtcatggtttctaatgtccaaaccagcactgtatcctccctgtggtagcctcctgtcatagtcagcaattggtacaataatgctgtgtaacaaaccaaactgccttgaaatccagaggcaagaagcagcaggcctgtattctcacactcactagttgtaggtggacagtgggtctgctgacttaggagggtttggctggtgacttggcttcgggctggggatgggtggtctcggtcctggctgtgggtgtgtgtgggtcggctccacctgtctctcatcctccttagaccagcattccctggggcatgtccttctcattgtggatcacaggagcatgagaagccaagccaaaccatgaggtgtttaaggcctctgctcatgcttcacatggccgagcccaacaccaccaatggggcagggacaggaactcttcccagacttggaggaaaggaaatatttgctgagcaccaactgagcaccaatcctaatgctcacacctcctgactggccttcttgttttcactcttgcccttggccatggtttatctccacggagtggccagagtgatcgcgttaaactaccaatcagatcagaccactcccttgtataacaccgtccagtggtatctctggacatttggcacgaaacctcctccctcacctacaaggcctataggatgttgtcagtttctacctccagatctcacttggcactatcttccctttccttgcaaagctccagccacaagggctgtgatctggtttggctgtgtcccaacacaaatctcctcttgaattgtagttcccataatcccaagggaggaacccagtgggaggtaattgaatcccataatccaggtgggaggaacccagtgggaggtaattgaatcccataatccaggtgggaggaacccagtgggaggtaattgaaccatgggggagggggacgattacctccatgctgttctcgtgatagtacgtgagttctcacaagatctgatggttttataagggttttccccttttgcttggcacttcttcctgccatcatgtgaagaaggatgcgtttgcttccccttctgccataattgtaagtttcctgaggattccccagccatgctaaactgtgaggcaattaaacctctttcctttataaattacccagccttgggtatgtctttacttttattttttattttgttttattttttgagatagagtcttgctctgttgcccaggctggaatgtaatggcatgatctcagctcactgcaacctccacctcccaggttcaagcaattctcctgcctcaacctcctgagtagctgggactacaggcatgtgccaccacacccaggtagtttttgtatttttagtagagacggggttttgtcatgttggccaggctgggggtatgtctttattagcagtgtgagaacagactaatgcaggctgctcccaggattttcactgtgtgccaggccccttctaccttgggacccttgctcaagccgctccttccacacatagcacctactctcccagatcttcctccacaatcaccccacactcaatctcgatcacctcctcctcctgcttctctcttggtgcctctgttgaagaacagtcttcatcactgtttataattgtttattaaataggtgtatttattcaaaaagtgcttcccgtctagactgtaagctcaaacacacagaaggacctgcgtgttttgttttacactaaggccctagtgagtcctggccacctaatccatgcagaatgaatgttatttgtacaaatgagtaagtgggtgaaagaatggactttaatgaaaatagagagactgaaccatgccagcgacccagctgagcccagcctccaaccaccccagccaggtgccagccatgtacaagagctgacctggatgtgccggcctagctgagtctccaggtgactcgcagtcagccaccatcaaagaaaaagaatggcctgaatgagcccagccaacccacagaatcatgagggataataacatggctattgtaagccactacattttggggtggtttgtgacacaggtactgatactgaaaccttgactttttggagtctagactcttcgttatctgctcctccgatctctgacctctcctctctacccaccattcctaccacgctccagagagatactgacatttggggacatctgactccatccagctctcacatgatatgggaggcagagcaggacaggtcccggagagggagaggcagatccaggatatccctagaaggcttccggagaggacctcaaggaaggtaaaatgagcagttttttgcagaatccaaaattcaatcaatacagttcccacctattaactatgtgcttcacaccaagctgtggcaggagctggaggtgcagagaggggtgaggcacagccccttgctcaccagcagctcagaagccagtgggagagacagacgtgtaaatagacatccaccatgtggcttgatccacagatcacagaaatatattcaatacagaaaggaagagactctcgtctcaaggcgctagggtagagatgtttccacccccgcctcctcgctgaaaagcagccacgacaagaaggagaacaagaaacagaaacacaaactcccaccttcaaagaagccaggagacacctgtaaccccaaaccacaatgtatgagcagcaagagcagatggagggtggtaaatgattgaacagagctgaggaaggcaaacctaagtgcctgctgctacatggtggggtggagtaggggctttggagacagaaaagatgcaaatcacctggtcttgcagaaccctggggaggcttagaattagggaacccagacatcatggatggtgaggcaggaggctgaaaacaggggttgtgtggaagtctgcttaggaggagtgagatcccccagcaccaccccaggtcttctcttttccattacgtggtcaggcacccacccctccctaaccccagcaaggagtattcagccagagttctctggacccagagacattcgctacagggcagagtgggggtgaggcaccacaatgcttttggagatgtcaattcgatgatgccttgcaaataatcactcctccactcctaccctccctacccatcactcctaccatgctccagagagagattgacacaccctctatgggaggggcgtgtttcccctctcccctgatgctgggcttggccatgtgacttgctgtggctactgggatgacaacctccacctcctgggttcaagcgattctcctgcctcagcctcctgagtagctgggattacaggcatgcgccaccacgccaggctaattttgtatttttagtagagatggggtttctccacgttggtcaggctggtctcgaactcccaccccaggtgatcctcctgccttagcttcccaaagtgctgggattacaggtgtgagccaccatgcccgggcttaatgcctcattctgaaacaggagtggctaacacaggatgactggttgaagaaggctctaatgatagcattgccccaaatgataaatgaaagagacccaatcaaataagtagaagaaaaggaatatcagtaagcaataaagatgatgcagtgagcagaagaaaattttgacaaaaccatcattgccatccttgaagagataaggaaacatatatccacaaatgagtacagaatgccatagcaaagagcaggcagaaatcaggagagagctggttgggctcagtagctcattcctgtaatcccagcaatttgggaggccgaggtggatggattgcttgaggccaggagtttgagactagcctgaccaacatggtgaaaccctgtctctactaaaattacaaaaattagctgggtgtggtggcatgtgcctgtaatcccagctactcaggaggctgaggcagaagaatcacttgaacccaggaggcggaggttgcaatgagctgagattgtgccactgcactccagcctgggtgacagagtgagagagcgagactgtctgtctcaaaaaacacaaacaaacaaacaaaaaaataaaataaaaaacaggagagagctcttggaaatgaaaaataggttgatttaaaaaaagagggactggaagagaaaaacagatttttttaaacctcccaggaagtagaacaaaattataaagatgagcaacaagaagaataaagatttcatccaggagacccaatattcaaatataataggagttacagaaggaaataacagaaaaatgtgtctcagaactgaagaacacaaatcttcagattaaaaggctacttggtgcccccgaagacaaatgaaaaaagaatcaaatcttgttataaaattttcagaaatttaaggataaagcaaagatcctagaagattccagaataataataataaaaaaattagcttaagttacacaatggattgggattaagaattgtgctggaagctggagacaccgacagacgccttccatcagctgagtcagagtcattctcaatctcaaattctatacctagcctacctatcaacatgtgtgagaggggaattcactattttgaaacatgcacaccttctctgaaagttactgggagctatgctacatcaaaatgagagaggaggccaggcgcggtggctcacgcctgtaatcccagcactttgggaggctgaggcaggtggatcacttgagcccaggagttcaagaccagccttggcaacatggcaaaaccccatctctaccgaaaatacaaaaactatctgggtgtggtggcatgcacctgtagtcccagctactcaagaggctgaggtgagaagatcgcttgggcctgggaggcagaggtggcagtgagctgagattgaaccactgcactccagcttgggtgacagagcaagaccctgtctcaaaaacaaaacaaaacaaaacaaaaaaaccccaaggcccccataaaatgagagagtaaaacatcaaaaaggaagacatggaatctaaggaactggattcatacaggaaaaagctgaagggaatccccaaacaacaatggagagagaatctcgggatgtcagctgcgcacaggcccaaggggcagctggcccagataagaggagctcgtcagtctccaggacgaaatcgtccctgaggctggactctggaaactccactgtgtggtttttacgaagctataggaacgtgtggaaatgcttagtccaagaaatcgaagatatttttaaaaaccaaaaaacgaagcaattatgaactcctggctgagcaggaaataatatttacattgcattaatcatgggaacactggatatgcatttaaccgaaactcatattgagaagatggggagaaggggtgagagtgcgtaagaaatgtaaacttctcctgtactgtaagaggagtcagtagataatgggtaaaattgagggattaagacataaaaaaatcaatatgatatttagcgagaaagagcttaactgagggagcaattgccgagcgggtgggattacctgtgggatgggggggtgggagggatgggggaggactgctgttttttgctgttacaaaccttttcagcgctacagtagtccacttagcgcagtttcagttacctgtggtcaaccacagtctaaaaatattaatagattttgaaagaaaaagagacagagaggtcaccatcatataacttctgttatgatatattgttatattgttttattgtatattgtattattaattattgctgttcgtctcttaactgtgcctaatttataagttaaacattatctttctccaccatcgtggtgtgtggttgactccgtttctcgccacagcttctcacaagactttcaggatcaagtgattcctgcacaagaaacaaaagcaaaattgtcccattccccagtggatctgtatgaaaactggtaataacatcaggtacagctccaaaaggagatattggaaagaaccaagctgggtctataaggaattgagcatgagatgctacacatattcatgttgtatcaaggttgtgatcatattaccatagcaagctgaaaatgtcaccactatctggacagctggacatgtttgattgggaaggtactttttctctttgttcatatgctctgcactagtaggctgggttcagtaatacataggtgagatcttttatttaaaaaaaagttatcagcctgtaatccctgctactcgggaggctgaggcaggagaatcgcttgaacctgggaggcggaggttgcagtgagccaagatcgcaccactgcattccagcctgggcaacagcgcgagactccgtctcaaaaaaaagaaaaaaattatcaggctgggcgaggtggctcatgcctacaatgccagtactttgagaagctgaggtgggaggattgcttgag

SEQ ID NO: 287 - DNA, 833 bp, Homo sapiens
aacaagggtcaccaccgacactctccaggctccggacacgatgcaggccatcaagtgtgtggtggtgggagatggggccgtgggcaagacctgccttctcatcagctacaccaccaacgcctttcccggagagtacatccccaccgtgtttgacaactattcagccaatgtgatggtggacagcaagccagtgaacctggggctgtgggacactgctgggcaggaggactacgaccgtctccggccgctctcctatccacagacggacgtcttcctcatctgcttctccctcgtcagcccagcctcttatgagaacgtccgcgccaagtggttcccagaagtgcggcaccactgccccagcacacccatcatcctggtgggcaccaagctggacctgcgggacgacaaggacaccatcgagaaactgaaggagaagaagctggctcccatcacctacccgcagggcctggcactggccaaggagattgactcggtgaaatacctggagtgctcagccctcacccagagaggcctgaaaaccgtgttcgacgaggccatccgggccgtgctgtgccctcagcccacgcggcagcagaagcgcgcctgcagcctcctctaggggttgcaccccagcgctcccacctagatgggtctgatccgccgccgccccaggcccgcgggctgctgacagagatacgcgccgtggtgcgcacggagcccttcacgggacgctacagcctgtgccgggccgggagctgggcagggggaaattagcagtggtgagaaaatgtataaagatagattctgggaaagaatttgctgcaaagttcatg

SEQ ID NO: 288 - DNA, 579 bp, Homo sapiens
atgcaggccatcaagtgtgtggtggtgggagatggggccgtgggcaagacctgccttctcatcagctacaccaccaacgcctttcccggagagtacatccccaccgtgtttgacaactattcagccaatgtgatggtggacagcaagccagtgaacctggggctgtgggacactgctgggcaggaggactacgaccgtctccggccgctctcctatccacagacggacgtcttcctcatctgcttctccctcgtcagcccagcctcttatgagaacgtccgcgccaagtggttcccagaagtgcggcaccactgccccagcacacccatcatcctggtgggcaccaagctggacctgcgggacgacaaggacaccatcgagaaactgaaggagaagaagctggctcccatcacctacccgcagggcctggcactggccaaggagattgactcggtgaaatacctggagtgctcagccctcacccagagaggcctgaaaaccgtgttcgacgaggccatccgggccgtgctgtgccctcagcccacgcggcagcagaagcgcgcctgcagcctcctctag

SEQ ID NO: 289 - DNA, 96597 bp, Mus musculus
  misc_feature (419)..(438): "n" at positions 419 through 438 can be any base.
  misc_feature (8061)..(8267): "n" at positions 8061 through 8267 can be any base.
  misc_feature (17660)..(17679): "n" at positions 17660 through 17679 can be any base.
  misc_feature (40373)..(40392): "n" at positions 40373 through 40392 can be any base.
ttaataaaccattggcagtgatttgagtttgttgttaaatatggttgtgttctgatttgccacgggaaggtggtcattggtttttaagagcgtatgatgctggtggaaattcatggagctttaatcactgtctcattaacagggtgtagtccgcttttcatgtttcttcatgtgttacagcttttccagaatgcacagaaccttatgtgcaattaaagtaattagggaagagcagtttttcctctttagcaaagggatcagatttcaaactgccctgctaatttggttaatatgtacttcttttagaaagtaccaaattctgataaattctttgatttttatctcctgagaacatgcctttatttctatcctgacaacagcataaaatctcattatcaaaacaagaataggagaagtannnnnnnnnnnnnnnnnnnncccaagtcttaacattttctccttcccaaatacttagggcatatgaattattttatttagtaactgaaaagtgtgagtcaacagagtgaggggaaggtgcttttatttttctaacaagacaaatgaacacaggaaaactattctgcaaatgtattatacctactgtattagtttaaccggaaagtgcaagcaagctgcttcctgaagagcctgctccagatacctcagtgactgaagtaaaacccatatggtgtatgtgtttaggcttacagtgggtttgcggattctgttgtgctttgataactctttgtgtcgcttatgggagttgttagaaatatgacctttgttcagtctctaatgaaggaggagaaacaaggcatgttctacatttatagaaatcatgtataatgaaaacatttactttaatcatatgacatgatagtgcctgaaaatcttcatatgtaatgtttttgtaggtaccttacactgcttatatactattaacaagaagcaaacattttgtccatccccacgattgtcgatggactgtttattcaagattctaaaattgacaaataattataaaattcaagaattgtacatacttactttacctatttcttttctgagcaaggtggtactttactttgaattagcaagagctggaaactgatgttataaatgacccatgggctggctgacgtaagtggagcaatactgaaccgattttggaggtatagaaaaatgtagattatttttacagcaaaaggcatttcatacttctctacatatccccatcagagagcatcgcagtggggattgaggtatagtgtcttctcaagttactagggaaatttcaacagtaagagtatgctttattgttgagcaaaagctctggtaaatgctttcttggaagcagtgacttgttcaagttcagacttaatacatgaacatgccttatggtccaaggatttatgttagtaaagtgatgcaaacataagaacaatcttcctatgagcacttgcagtctcgctgagaagtcaaaacctgacattgatttaggtcactactcacaaagaaggggcactgagtgaaggaatttatagctcttagcacgtaattatgttggcctgtttcatttgacataaatccttataacacatataataaaattaattcagattgtatctattttatattagaataacaacatttgttgctatttagcatcttgggtctaggtaaattgttaatttcgttgaagccagtctctatttacagtacattgaagcaccacagtgagagtgagttactggtgagtctttgttttctgacatttcttactgaaagcaatcgtatgtgagcttatgacttaaaaaagctctaatttgtataataatctaatatggaataactaatatatgaaatctagattgctattaagatcaaatctatttatcagaagaaatatttttaggattgaaatgatgaattttgcagcagccatgtggcttgtttttatgattttggaacatgaaatattttggtgaaaaatacttcattgatttttatgggaagaagaaaatatttgtgtgtggtatttccttatgagagcagtactaattcatttcttagaatatttccaaataatatatacagataatatatacaaataaattacacagatgattatacagtatacacttttatatgtcatggtttcattgattatattctaatgaaaaatacattttaattataaacaatgcttttatacttttctcataataataactgagcaacatatatagggtaattttcaatagacatagtcctgaaacttttttctaacctagcttaccgtgctagaatttaaaaccaatgtatgaaattgaagagctcgctgttgaaaatcacagagtaggaacccaaatctagttgatagtagtgagaccaattgttacaatttcagagatctcataaaatacagggcagagtaagactggtgcttacagaggtaaaattatattttgggtaggttttaaactatatatgccatttcttcacatgtcatttttataatttatgccacttgagtctgctaaaatgaaatatgcatatttaattatgtacattgtagggctagtcaaagggaagccagagcatcttagtgaagggtctcaaccgcaggtatcactgaagtactaagaactctggaaatcttactcccctgttgatcaacttcatgcttttgaattgtgaagtgacatcattgccactcatctgtagcatcttttaaaacctttacatagaactttcaccaacttcataaaggagcttggtgatgctattcacaaaaagagaagttgaatattaaattttacatttgctgctagttactatgttgaataaacgatttctcctttgagcaggccttatagtcatagtccacgatcagagtatcactggggcctaacagcatcaccaccaggcttccaggcttgattagcagtttggacaggctcatttcacaaggatgaactctggctttttcagtgtttttttttttttcccctgaaaattccagggaggtgattttcccgatttcttgtggaagacttaatagcattaacttcattgttgcctgtgttctggtttctatttatcactttgaaatagtaaatgttacaggcagatcagatatggtaagcgaagctagcaagataatgtctatctaatacatgagtaaagggctgggatctcctcaggaggaacagtaaaatagcatgcagttctctctcctgtcttcttggataacagagggaactgcttcagcgctggctaagtgtcataggaaactgcaaaggaattatactttatattaaagcaaatcttttcacttcacaatcagggaggcatttaaatggggttctattgcctcctattctcttgccagttggtattgctttcacttaattataaagatgaaatcaccagtgtttcaggctgtggaactggagtccatacaatgtaacttgttgaatgcattttgagactagtatctgtgtgtgcttatctgtatctgcatctgtatctatcatccatgtctggctgtctctatctctgtctatcgctatcttctctgtgttccttattcatatgtttatctatctactatctgcctaccacctatgtacagtctggaagcagagattatttgtttcctttggtccagtggagtttcagtactgattatagagaaaaatagcctgtgctcatgggatttctatgccaagactgaaacagtcaatgagataaatgtttctacttctctacttcttctttccgttatttcttctggttgatatatgatgtgatatcatgtacttctcttacaaaaagttcgtactgctctgaggaggggaaaaggttggtcacttttgataaaggtgaaccaatggactgtttggctacaaagctagtgactagtatatgaagtacagccatcattatgataactatcttctcttgatgttaatattttaaaacttattttcttatagacataaattcaacattcacttttttaacataacttttacttttttacagtctagtcattcccccatcctggtcctccctcccacagttcctcatcccattccttctctcccctgtctttaagaggatgttcccaccaccctaacctcctgccaggcctccccactacctgggacctcaagtttctggtgggttatgcacatctcccactgaggtcagaccaggcagtcctctgctctctatatatgttgggcctggggtggggtgggggactcaggccagctggtgtacccacttttaaatcattgcatgcatttaaatatgtattttgtttaaaattttctaatttgaatacagttctgtcattctactctttaacaatggtgtattaagtaacctgtactccttcattatctgtcctgctatagctatttgactgtttagggaacctgtgaacgaatcattattttaaaagcttgtattgacaaacctcaggttctttgtgcgagttagtaagtacagacttttcttggcatcagcatttctgtaatgtgttagaccaggaggccgcattgacagtctctgatagccaagagggtgtgtgattgtaggttagcctttttttttagcagttcttcataacttcagtcatttgcatgtcaccatgattttattgccaacacattagcttggtcttagtcttctaattttttttttaattaaagattgatgtctgtgtaagtcatcacatgacatattacaggctgtacaagctggtgtcagcactctgggcacctattatgcatctccatgccatgtccaggcacaccctgacaagtactgagttcagcagctctgctctaagaagagtgacccttctgaaggttatcaacctttcataccacagcctatcacaaagcacagttgtgactttaagctgggacagtatggctgcagagctctgcagaagcacttagtattattttcaccctgaaatctgttaatatttgggataaatgctgagaaaattattgtgtgaggaatcagtcttgttgatattggcaaccaagaaaaaatgctttggacaaggtcttcctttttgttacctccaaacttacacagtgaaataattcatattttctatttagactaaaactatctaataaatcaaaattgtaatgagaccccacattttaattcctcaatacataacatatcttaatatcaaagtatcagaaaaacatctgtcagatgtcttattgattaccttgggatataattggagttacttacttaagtttgtcttatagcttaaagggctagtaagtgggtagcctaagacattaaggtccttcctaaaggctgtttagttcactgaaagagaattctgcctcatacctggcaggcacatgtttcctgcacactgtgatgcatgccctccctagtcagtgtccagtgccgtcagcttactagaacagaagcaaagaacaactggtaatgcttcctcatgattttctttccctttgtcattttcaacacatttttcttttttttttttttttaagatttatttatttattgtaagtacactgtagctgtcctcagacactccagaagagggagtcagatctcattacggatggttgtgagccaccatgtggttgctgggatttgaactcctgaccttcagaagagcagtcgggtgctcttacccactgagccatctcaccagccccctcaacacatttttctttgtttttcttttattttctctctctttttttgtaatttttactttcttgattatttcatgttgtttcctttttacttcatagaatgtacacatgatttgtgacatcactttaggtgaaattggtttttgtggcagaatttatttggctatagggcatgccatatgattcaaggaaatgcagtggttggaaattgatcagcgagtcacagagaatttgtcctataaatatcagaaagtttgaatcttgttcaaaaatctttaaatttccaaacaagcattttgtttttaaggtaactttatttgcttatagtatattgaaatagtcagaaacatcacagaggcaatttacctgttattaatcatcttagaagtagattaatttcacatgataattattaaaaaaaacccttagtttcagagataaatgttgtgaaaaattcttataatttgtatatcactcatacatacagttttcttttcctctcctctcctctcctctcctctcctctcctctcctctcctctcctctcctctcctctcctctcctctctctttttcttctttgttcctcctcatcctcctcgtcctccttgtcctcctcctccttctccttctctgtctccttgtttatgatacagttttcattatatagctccaactggcttggaattcactctgtagcttaacctggcctcagactcttggaagtcttcttactttagtcccctaagtctgagggcgcatacactgttaaatattatctcagattctctctgcttttagggccagacactgttactagtcaaagttacattctgagaattcaatgttgcaaatcctttgcagtattacctcaagcagagcaatttcatgaaattaattaccaaatgtgtacagattgatgtccattctccctattcactctcttacccgcctaatcataaacatgctgattatcatctctgcctatgttcatagtgatcaatttacagacatgtttataattttctagttgtaacttttgaataacatctcttatatggaatgaaaataaaatagacaaaagtatgagctacaggcaaaattttaattaatatatgcttcatatatctggttttttatcaatatgaattaaatcacacatatgttaaacatataataatatctgttgtgttttaagatctagggtttaggagaaattgataatataccttgctgtcagggagatggtaattttaggcagaaggacctaaagtgagaaacatatttatgggatggaattgtggtgtgttgttgctcatggttggtccagctttacagagaagatggtatctgaatagcaattaaaaacaagaatggatttgccaggttgcatggcttcagggtattcagccagattgagtgatagtgtgtatgtagtatgctcctggggttccagtagtctgttttgggcagaatctatgatagttcatctctgtaaacatagggatatgggatcagaagctaaagaatgatgtgtgttggttcattcatggagaaaggcctctttacagtggcctcttcaacacttgtgaggactgagaaccaactgctgtttgatagagaatgggcgcctctaggtctagaaaaggaaaggggtcttgagaaggaaccagtcaaggtggacgcttgtagacgtttcctgctggggataactgccacagaagatacagacagacaagcaggaagtccagggggaactcctacccaagggtgacgtttgaacaaaggaataaatgtgatatatgagaccgccaaccagtgagagtgagggaatcatggaagaggagagaaatgaggtagagaagacttggaggatgctgtgtaagagagggaaccatttaatgcttgcctagagactgctgggcaaaggagggcttgcatgaccctgggatttgtagtatgtatttgattccagtcacatgtgattacatgggtatatggatgtccgtgtgtatgttacttttgtgtcctcagtaatctgagtcctgctgtagtaaacaatcatttatacacctatgcttttgggacagctttctcgcgtttgttgttgttgttttgtttatttgtttatttttgtctgttttttgtttgtttgtttgtttatcactgttctcaggatactgagatgatgtatgttgtttctgcccctggaaacgtggtttagtggctccaatgtgtaaggaaataaacatgcaggacagggatggagatgtggaggcaatgcaaaaatggtgatattagtgtgtaagcgaacagagatgtgtcannnnnnnnnnnnnnnnnnnnnnnnnnnnnnnnnnnnnnnnnnnnnnnnnnnnnnnnnnnnnnnnnnnnnnnnnnnnnnnnnnnnnnnnnnnnnnnnnnnnnnnnnnnnnnnnnnnnnnnnnnnnnnnnnnnnnnnnnnnnnnnnnnnnnnnnnnnnnnnnnnnnnnnnnnnnnnnnnnnnnnnnnnnnnnnnnnnnnnnnnnnnnnnccttttttttaaaaaaaaaaaaaagagagagagactaatcgctgtgtgttggtggtggtttgtacaagttagaagccttactttcctcacagcgttcaaaaggaaaacaaaccaaaaacatacatgcttttattttttgtaaccagttaattttttttgagaaacatttttttcacttgattgaaagagaaagtgagctatttagcagtgaaactgccctgttctaaagagtgggctcctgagttaagagaaggcagctgcctcagcccctaccctccagcatagtgtggggctgaggccctgaagtgcatcagactgcccaaatcaaattgctcacttaataattaatgttcctgcaatggaatcgctttctccctggaggttggctttcagatttaccagacatctgacaacactgcaccccttattctcgacacaagacctcagcttctgctttaagaaacatctgaataaaggatgcttttgttcatccctcgcctgcctgtgatagagtgataaagtgtctgatggctgaatggaatagttttacagtgtgagtgctgctgtcagcagaggggcagggcttgggttttaggaggaagtgaattggataggtcaggagaatgtaccatttgtaaacacccctttccttttttattcacgtgtcaggacagccacggcaggctgctgagtgtccacccctgcacagaaccagagggaaagcagctcggacttgagctgtagtttttaaacattgctcttgattactcgggagtgattgtcaagtccttggacttgcgttagaagctgtttggaaactaacatggtttagtccactaactgcatgttgggtaaattcaaaacccacatgctcgtcctcttgcagtggaataagtcacatctgatggacattttctgtgcttatagcatagtaatgaacgtctgacaggcgcgacctttcataagacaacccacactattggctttctgcccagaatattgctgcaacactatctgtgattggttatctctctatcatgcattgcttcacaaggggaaacggccccctttttaataaatctacgatggctggctgcaatatgcctcactgtaagtatttgtgtgtgtgtgtgtgtgtgtgagagagagagagagaaagagagagagagggagagagagagagaaggagagagagagaagcagaaagagaggagagagagagagagaatatgaagctgactttgagttgcttagtctgttatcacatggcaaggttgtgctgctataggacatcagtgaatgctacttagtaaatcttaacctatctcttttctctacaggttggtactaagaagtgcctttcctgacgtctctgctgcttggaaccgcttctagagcagcctctgcttttgccttgcttgctgccagctagactgacgacagcacatccgccctccacctctagcccagacaccccatttctacttctaatcaggagaaaagctctgagtatctgccattgccctaggctgctttagtttagaagaaaagtttgctgaaaaagtaagataccttctgccaggaaatcaaggaggaaaaaaaaaaatcattttctcgattttgctctaaactgctgcatctgtctatgccaaactaatcaataccgattgcaccaccaaactccatcgcaaatcagctgtgaggagattccctgtcagacaactttgctgaaagcagcttggaaattcggtgtcaaagggtctgccacgttttcatgcttgcattttgggctccaaattggcactgggaaggggttactgagcacacggctgagtccaggcctcctctaaacacccatctacttacagtcctggtattcctctcaaaaccaaaacctctttgaattaacagtttcatgctgtgaatttctagcggaggtctttccctttatattgaagtcacacttttccatgtgccgttaaatcggggacgggggaagcagcctttcggacattttcacagttatctcacactctgagttttatcagttcctattttgtttagtttttgtcttttgttttggttgctgattttttttctatttttctttttcttttctttttgttttttccttttttttttttttttttttttttggagaggggttgggtttgttggtttcattaaacatttaactacctgtaaaatataaacatggctgttagtgtcacaccaattcgggacacaaaatggctaacactggaagtatgtagagagtttcaaagggggacttgctcacgaccagacacggaatgtaaatttgcacatccttcgaaaagctgccaagttgaaaatggacgagtaatcgcctgctttgattcactgaaagtgagtaaatgttacctccttttaaggatatgcaatgattgattaaggggtatgggtacatggtactctaaatttggaattatgggttgttttgttaacactttagttactcagaatgttctggctcctgaggctggcctggggctctcaactagatctcatagaatcaaacagagccaaactttgttataaataactttgtcaggcctttaactccgaactccatgcctcccctcccctccctttcttttcttttcttttttttttttttttcctaaagcagaattgttacacgttgatgtagttgtgacttagtgatagcaagtcagagtctttgttcagcaatggtaaatgtttacattcaagactttcatatataataaggccaagattgaatgaatatatgttgtatgtctttgttggtaaactttgtcaagctgttataaatgaatggcaaattctgtgtcagctgatcataggtaacatttttactcttttttttttttttttttttttttaatgagatgattttaatggctaaagccatgtcctttttgggaaaacatgactagaagtgagagttttgtttcggttgctctggtatcttatccaaagcatatactatattagatgtggactttgtaaataggcacaaactcctgtgtcctgttgttcattgggattttcatattgaggcaatgcagatgttcattttctgtgagattcttgccagttgttacttatagtgttctgtcagaaatgttaaaagttagccttgtgtgtgtgataagaagaaatggtttatttatgttagaatttttgacattcaaaaaactgtcattggacttgtaagccctgtatcaggtttcaagtgggtcttgtaaagatagcacacatgtctttgttttgatacaaggtcaaggctagaaatgtgttctggggtgtcttcaacctgcttgatttaatcagattaatttttgaatactaaatgcctacagctaattctttgactcttccaagatgggtcaccatcatatggaagtctgtgaagaagtctcagagacccatcatgtttaaaaccaaaccatacagtaatccaagtgctttcttacatcacgtcagggtgagttagaagttaaccgtttcagctcactttgtgatgctcgatctggtaaagtttttgccaaatgtttaagatttgattttcagaacaggatatgaggaggtatgtgttagtaaccacagacctctgttaagatggcatgctatataggcagagtcctagttgaggtgaataaggggaaattaccactttctctcagcttggccttaagggatgcctttattataaaggtgttgatacctttgtgaacattaatcctgaattaatgctcaccaattcaggtgtaatgagagaaggatccataacaggaggagcaaaggactaattgcttttgtcgggaaacagctgtgtccataagtaactcctttttgacccaattcctagtaaatccagtttataatcctatagataattggtggtaaactcctagctcagaaatgaaggacattaaatttggccgtgacattgaatggctttacagaagacctgccggcacagggtttggaaacattgtgaaacattagtattcagttgctatttttccagctccaaatatttttttagttaccgttcacttgtggtcagagaacagttcccctttgaggaaagcaatcgtcctgcttacagacacccagtgtccctaacgaggttcaacccccacatcaaggactttaaaacaaacaaacaaagaaaaccacaagaaaaaaaacccaataacaaatgaattatattaagttttaaaaattatttgtgaaatgaatttactataccagcaaatcacagtaaacttcatccttttgttttttactaagaaaagctggaatttttagtttcaatatttggcaaaacatttgtgtgtttgtgtgtgtgtgtgtgtgtgtgtgtgtgtagagggaaaattcaacacaaatttatttgcgatagagcttcatacccagacaatacctccttagatgttagtgaaataactgttaagaatcagtcaacagagtttctatgtgcagttaagtatttgttggacttctgcctattaggtagtcctatggtgttcagttttgtggctaaaatagatccagtacacatctcaaagcacttaaagtatctgcctgactcatgcttgaagttctgaagtttgggagcattctgagacttggcagctagcaaccaacagatcatctccattgtttcagtaaatgaaaggtattttaaaaacttataatatcctgacttcttcaatgaaatgtgctttctgcattactttttatttctgctccagcctcttttgagttcttgagccatgagatggaagtagcttgtgtaatctactatttttagaaagttaggaaagcaaaccaaatactctcagagaggaccctgtgaaatggctgtacccttcagccatgctgtttcaggctttggctgtgctcccaggtgacttaggtttatagctgacttctggttagaagagaaatcctctctctctctctctctctctctctctctctctctctctctctctctctctcactctctctctctctcaacacacacacacatacacacacacacacacacacacagaacacaagttgagcagaaaaaaaactatttatctaaaagaaacccataacattcctgtaattttaaatgaaagataggataaagcagtccaagtttataataaatgtgctgcaaaaatggactgtgataagtaggaatatatgtgtgtgtgttaggcctttccaaatgcaaatactgaaaacaaaagaggagtaataggtcaagtgtataaattaaatagcatttaagcactttattaacttagtttaaattcattgtagtctaagagtatattctagccattacttttaagtgctgataacttacaggtctgggggctgtaggcacttctcagaacaattgatcaagtgcatttgattctgttctgaagaagattttttttctcttatggcttatgaatagtactccaaaagaggaggcaaacgattaaaagagaagactccaacactgcaagctgccaataaaatgatgccatgtttcagaaatggtaattccagcaatctgactgtcatgatctcttcacagttctgagtttgtgggaatggagtagatgggatacatttttatgtgacgccaaatgtattacagtctcaaaaataagtgttcactatatcatcagtagaaataaacctctggtgttaacatcaggattacatggcatgactgacttgaagaagtgcccccgaagtgatggcagttaatttcagaatatcttccatgattgtcacagtctatttcccccagagaaatggttagtctcattgttgttcttacaaaggcaccatcgtggtcctttcatcatgtgtttaaagcagttttagcagataaacctgcagaatgaagcacaggagattggcaagtcctggataatctaaattctagtgtccccaccctcagtgacctttgatgagcatttgctgccttgtcttgcacacacacacatacgatgctacagttttgaaggatattaacctcctgtattctgaaacttgtgcagacatgagtgtgtctttagcaacaggttgacacagcagagttttttctacaaaagaaacagcttgtagagcagcctgggtggtttgcatgttcctgttgtatccagtaagcagaaagttcacaactctgtcaagttcttcctgggcctgtgaggcaaaaatcatcaattctgacagcaatatttccttaacaaaatgctcagcagctatagctgcctcagcagtactaataatagctttagacacatgctgttcacattcttaaattcttaaactttccttaaatagggacttttattaatttttcttttattttttgattataacatattatattattttccctttcattttctcccttggaaccctcccatatacttcttgcattccttcaagtccatggccctgtttttccttacatgttacatgcaaatgtggatgtgcctgtgtgtgtgagcatttacacacacacacacacacacacacacacacactcacacacacactcacacacactcacacgcacacacactaatatttttattttttccttaaatacattagtgccaccagctcagtctgtataatgtaatttgcatgtacgttttaagggctgacattttggtattggttaaccaattggtgtgctctttctcagagaagacagtctctcctactctgagcattcctctgctgcctgtggctttttatgtagggtccaggcctccgggtatttccactttgctctgtccactatggcactatggcatggtgattgttgtccatggtcagcttgtatttaagggctcatattaattcctgacattactaggggatgcagtctcatagcaacgttcctgatctggcttttaacaatctttctaacccctcggcttcagggttccctgacctttaggtgcagggctcttttgtagatagatccgtttcatctggattccacaactctgctttatgtttgtttggttttggttgtggtttaaaaagacagtcttttaagtgactgaatgtttttatactgtcaggcaaacaaaattcaagacataaagcctgttaaggtatagattcatgctatgttgcattcttttgtaagattttaatatatttctcctttttctcatttagtcttgcttcactgtgttagcatggtcaactaaaaaacgatctaaacccaaggcagcttggagtgtaaacaggttcaaagtttacctgtgtgttggacatctaaaactacttaaagtttaagtagctttaagtctctgtgatatgtagggtaaatgtactgctgaacatggttcatacaagcttccaagtccagaatgcttctcagccccaaaggacacccaggccagtagcctgggaggcctgttttgttgttctctttgctaagggtaagtagaaggtttgagcttatcatctttgccagtgcatcgcctttcatgctgagcagtgtctctgcttccctccagacctagacaaagccttttattttctctaaagaggttctaatgaggaaattacccctactccacccttttaaactttagcagacacacattctgtgctcttagataagggaataattttccatgttattacttaggtcagaatttctgagagtcagtagcaatgggtaactaaataggtgacctttgactgttctgctgatagagattagtgtgcagagactccaggaaaagtgactggcaaggctgggttgagaagacttcgttgtacggtgcattgtatgttagagcggtaatgtttcgtgagttccactgaagtggtgacactaaacagattaactctagtaagcatgtagctcaacactcatttacaccatgctggcccactaaagagttttgtaactaacacctatcatgtaaggtaatcactaaatacacttctactgatcagctcctttctggtattaatatttgtgattattttaaatttcgatttatgcttgatttattagaagaaaagttttttttttcttaatttttttctttacacaagtctatgctttgagagtttagtgagagtttccaagctgtagaacccattctatactatacctttactggcagactaaccgggtatttttgggcctggtccttgtcacacatacttctttctcatcctggtgactgcccacacaatgtcatttcaccttccacctcacctgacaactgcccttaattctgatttaggggatagttaaacaacccgtacagttctggagttgttggctctgatctttctttatgattcccagagatgtacagggcccaaataattttgtatggcaccggattttgttgttcctctaatttttatttgtacttccttcacaaatacattttttttacttctttagtttagaataaagcgagtgaatagttactaaattgctctgtgttgatcattgttttcattttatgataacctaagcctatacaacaactctgataatagtatcaaaattgacagacagggaagtacagaggagccaggcgctgctcaactgtaagctatggacctgatgcctggtagtctaatttcagtttctgtactcaatcacaccattccaaatgctgcttttaatttacatatccctgtgctgaggaatcaaccaagaagtcatacaccattggttgagcatagctaaatgatgattcccagcacattgaaggcatagggccagtaagagtaaatacatataattgtgttatgttttgagttaactggtaggccatgaagctaatccaaggtagcaggaagattgtggtggtgttagacacaaagattatgagtctgtcctaacatataagaaaatgagcttaagtttactacctcagacaataaatcaatgtgtcagctagatagctgcctccatgtctagaaaggggggctgaagaggtggctcagtgcttaagaatactgggctgcccttccagagaagccaggcttagtttccaggtcccatacagtgttttatagcttgctgtaactccagttccagagaattctgtgcctttttctaaaccatggttaccagccgtacatgtggtacttatacatggatgtaggcaaaatacccatgcataaaaataatatcaatatgggagaagaaaaatggcccaatgtcttcattgtttagaacatagttaaaacatcaggcccactctgagaagccaaacaactataaggttcttgagctatgctttaaaaccctggctacgaattaaaccaggaagactccacaaatatactgtgagctccatnnnnnnnnnnnnnnnnnnnnccagatttgggttgtgcttgtttcctgcagaggtcttcaagagcagagttgacagcagtgtccacattttgtgggcatcacctccaaggtaggaaggctttcattgtcaaattgtcttctaagaagcccgctgggctgggctgcatgaactgttgtagcttcatgaaggtagtcctggtgaaatacgtggcagaaatacagagtgtcaagctcagaattttattttgattttttcttgccattttataacagtaatggttaacgggtcagacatgaagaacaaatctatttaaaagctaagaaagtataaggatttaatatttaaagaggatagcaagcatattctgtcttggactttggcaaagcagatgtgagaaatgctgtcctcatggtgctgattgtttctaagggatcctgtgttaggagcgatgaggtggagattaggagggaactttcaacagtaacaggaaggtcagcgtgagagcaacttgaggaagggggagagggatgtctttagtgtctaagctttactctccctcacaactactgactcaaaccacagatgggaacagaccagagagtaccaaaaagaaagaagtcccaagtcccaggcttaggcctatgtcttggatgaccttgctcagaggggaaactccactttaacctgtagtctcaggttcagggctagaagaatacttctgctatctgagtttatctactgatgcatatgttgtgttttgtgtcagtatgagtttgaggcttgaccatcaggttcccaaaccttgttgcttcaaaggccctaggactccagtatgcttttagagttatctctctgcctccaatacagagacttatgctgatatctaggtccaggctgtttgtacttgaggcaggaagcatctgcggttaatagttgacagtaaattacacaaaataaaacatggaaaatttaagttagcaaagctggggaatttttctatcattttcaatttctctacagatacggacataattagtgtttaggatcgcttgtgatggataaattacatctgtaattcattcttgccatgttactgcattcagagaataatttgctttcagaaatcattgctcatataatattctaaaatcgttcttagactgaaaacaagtttagtagcatgtccctatcgagtaagctcttatatccatcagtttcagactagaaagaggtattggagaaaagcagccaaatgccttcctggtggatgatggggtttcttaaaagattattctccttcaggggaggcaaccacaaagaaagatggagaaagaagaaccacgaaaaaggaaatacttgaagaattaatttttaaatgaagaatcctattaaggaagatttgtgttctgaatgcaatatccccacattatctcctgtttctccatggctatgtgatgactaatgaaatctaagtctagccatgagagaagattatcgtcatggtcttatttattgggcttttttctctgaagaacttttattactagatattgcttcccatgaattttagcacagttaaaaaaccaaaaggagatgtccttgaaagaactcagatatatttacaagtaacaatcagaataagcaaatctccaaacaccactaaatctcaaaactagaacaaacaaaccccccaaacaaccctttagcctagcccctgatgagctataaatcatcattcatatttaagaaaaatcatttatattgccaagttttacagtgggatctattaaaatagttcctgtaaaactcaaaatcaatgcttgaagattaacttaatattacactatcgaataaaaaggcttcaatgggcagaacagtgaacgcagaacggccttagtagctactgtcttctgtcattcctgccaaggatgaataatgacagagaagagattttcatgagaaatatctattttaagaaccagagggttggggggtgggttcagtgggtcacagcactagctggacgagtgtgaagaccagaatccaaatgccttacttggggaagagagaagcagatcctagaagccagctggttccgtgagcagcactgtgtaaaggcctcaaggtggagtttagcacccttgtcacctgcatggccaccagctctaaccccagatatctgctgctcacacgtcctctgtgcagcagcacatgttgtgcttttgactgttcacttgatgtactaggtatttgtgacatcttcatggaagtgtaaaacacacactatttggcctctctggttgttggtagatgagtggctattttaagatcataaaaataataaaaatttgattttattctgaatttgttttgaaacactggaaattttctgtataggagaagccaaatactcggcatgtttttattggaatggtcactgctgactttcatatgacaggagagttagctaagctcctcatcacagtctgccattttgtgacataaattgagacacattgacttttggacaacacatttagaaattgtgaagtttcctctgctgatttgttcaccagctccctattgtatagattgggaaagttcagagcagttaagttacttctccaagcttgctcagtgagaggcagcttcccggggcttaacacaggcaatctgccttcacagcttactcttttagcctatctcctgcgaaacttgtttaaaaactattaatactgagaaatcttatagcatgaccctgtccatacagcctgcatttaattaccaaagagtttttctatgaaaatgttgaacaagtatcgattccgttacagcagctggctgaatttaagatgagggtactttaaaaaacaaactctttcacatgctttcttaacaataccatccctgaataattgctagcaaggtattctctttcaaaatttgaaacatgccctttgtagcctgcagccttatatagtatagatctctggtcaggttacatctgcatagtttcacaccttgcagacaacaaaggaggtagaaaatcagaaaacagtttgttctagaaattgaagaagagacacactggagttccaacctggcagtgatatgaaaagggcattagataaggaggcctctcagttcatcactgtccttatatctttgggttaaagtggaatgtctctttttattcactgatacgtaagcccatgcagctgttgatatcattttgtatgaggctgcaggttcagcttattttgtagttttcctaggaactataatattagaagcaaaatatgtacttcaaaacctttgttaaatcttccatgtattgatgttagaatttagacgaaacaactgaaatctttgtttcccaaaacatcttcctgccatgtgttatatttatgtatttatgaccctaaaaggatatttcagaaattatctaggactaaaatttttattctttgcatatcgtcaatatttactcactatactaattatgccaaagtaattttcatgtgatataaataattttattaagtattttaaaacaatatatatatttctttaagatttttgtaccacagttagacataatgaaaatgactattaataaaagaattgattccatttttatacaagatgtggaataaagagtatgttgtgctaaaaactttgggtttcagaatatgaaataaattcttatgcttcttagatatttaatgaacactgtgtaaccctgacctcatattgaggagatattgatcaagtattagtgttcttggtgtacagtataggatgacacacgagtcttctcagagcagttcatttccacagtatgagctcgtgagacaagagcccctaccccagaggatcagcaactcatgtctgttagccagtttcagcaaatagccatttagaaatgtttctgtttaaagtggaaagctgcataggtttgtggattctgatatgccaaactgacttttctctagagctccagagattacagagaaaagtgtgtagtgttctttgtccttagatttcatttttctggcttgtctgtttcctttattaatttgctgtagattgagttttgcttgccttgttccctttggtgttttctgagtgtctagtttggacttcattctgtttttcttggagtgatttttttcctgaaaactctattattgcaaataaatattgatgccaagagcgatgagcaagtggccaccagtggtccacacttagatgcttcagctgcctctagaatcctagtcaaatttggatcttcataatgatcacacaaagccatatgctaggcgtaatgtaagttagaaacaaaacaaacaacaaacctattttctatggcaccgacaaggccttgtaaatagatcagacagtagatccagccagggcttttattgcagaggagttcctgtgacttcagactctttattgtcttatgcattttttttctcacttataacatgaatctgatgcttcagtaagaggattcaataaaatatattacaaacatcactaaatgtatggatatactctacacaagaggcattcatactgttctggtctgaatgttggtagtcagtcgaaattatgatttccctctgtatgaggagcctcgccttaggttagaataaataaatgtgactgttttgcatattacactgtcagtagattactgtgcattgtttcattgtgaaatctaaaccattctctatgacataggtataaatgttacacagtagcttatttacctacccttccttaacaggagacaaccccaactgagcatgtgcacaacttcatgctaacgagtcagtattagcacaataaatttcatctgttcctaaaatccatttaataaaggtagttatctatgagtggaaaatagttatagtcatctgttctgattttaatcctatttaatacaaatgcctctttagttctgtgctgttctacaagaaataattcatattttacatttcaaatgcaatatgtggatttcatattaaaagactcatgtgtttgaaagattttatttttaattgtgtgtgtgtgtgtttatgcatttgcatatacacatgtgtgaatacaggtgttcatagagaccagaggtattagatctctggagatggagtttcagatgaccatgagccttgtagtctaggtgctagaagcactacttgggtcctttaaaacaatggggtggactcttaaccactaagtcatctccctataatccacaaatgttaatgtaagatatatatttatccaacaaagttcctgcacaaacagcatcaacttcaagtcttcctttttgtattttattatcttcttcctttgatctttttaatgtgtatatctcaaactatagattcagttaggatttcattagattccaaagggtttctgatagcataaagtataaaccttagatctgtctacactccttcctttatggtttaaaagtaatatccaactattctgattgttccaacctcattttttctcttgtacttgtaattaacagggcagtgctgttaggtattaatataacccaaggtattaacctaattcataagtgtaagatgtgacttgggtaagagaagaataaatgcttttatttttattttttgtgagcaagggaacagccttatttgtaaaagcttcagtgacatcctaagtatgaggtatgtgctgccttcttagttattggttattgcccatgctagagtgttgcgtattgattttgtgtgtggcaatgagttaggtttatgatctaatgttaaaggaggttcaagtatgtgttcagtggatttgcttgtagacttctaattgaataggctatttggggtatttaccgcctagagagactattagggaaaaaagcagatacctctgagggcaggaaaaataaaatttattttcaaatctctaggagttgcttgaagtggcagaaccagacctgccaggaattctgtaatcgctttgtagtgagttagctgatgcctaagatttgaaatttcatttacatgtttcttataaaaattaatggtttaagcaccacaaaatgcttagttttatcttgagaaaatctcacttgtctttcagagtggtttcatggtaaaactgtattataggatctgtaacaggaaggaaactgagctgcacagtgtgttgatatttggggtgtagtagagatagaaaactaagctaaggattaagttggggattagatgagatagtttgtttacttacaggattatttcctgtttcataattttttataaaatggaacagatagggctaatatttacttatcttctttgatattcgtaaactgattttccaaacttctttctttttctctttgtgcatgtgtctgtctgctgtgtgtgtaggtgcacatgcacattgtgcaaacccacacatatggaggccagttgtatatctgatgtgccactcaggtgctctccagtttatttgctgagggatggtctgtcactgaacctagaactttctgatttggtttccacatctagcagacattgctcatctatgtctcctgagtgcacgtgaaataaagacacatagatacctattcccctcaacagagcctcctccatagctcccaaacattagataattctcacccccttctatacacacacacatatatgtatacacacacacacacacacacatatatatatatatatgtatatatatatatgtatttatatatatgtgtatatacatacacatacacacacacacctaccttagactgccactctggtcactcttgtctgctaatgaacgcaattttttattctaacaactcacttggctccaattcatggaaaagttttttcaacccttcagctccaaggtataaggcaggccagtgttaaagaaccattttcagaagccaagtttctctagataacatcagtagtaaatgtgcatatggttatgcttacactccccctcttgtttgctctctctgaataaaggcatgctttgttaatcctaagtgacattatggtcccagttttctttgatgtttttgaaattaatttgctttggttgaactgaagcagaacacttgcctaacagtaacacgtgccagggcattctgacccacagccttttgctgtccctgacttgtttgacaactgtataaattttgaaaatgtgaccaaattttagaatgcgtattaaatatttacctcagttgtcctcattgggattttagcagtagacttgtgatagtgtgtattaaaggtagagagactaggagagatgctgtgcaccagacaacttctaaatgccttggagagtcaccttccaaggaagccatgtttataatgagttgaaaaagtacttcttttagtaactattccagagatcagcagattagcattggggttaaaaggcaagtctgaaactacatgcactttgagctcaatattaacagtaaaatgtatttatctcgaaaactttcccgaaagcaccctgtttaatgcatttaaaattgatgaataggtcatgaaacccagcaggtaattctgtaataccattctttgccagtattatttgggtcgtcatgttggaactatggagattttacttcgtgaagtgtgtgttacattctagtaacataaataaaaccatatcagcataagcagaaagataaagtgttttagctgtacagagttattgtaaatttctttcactgtctggttcaatactgcatttgaattaaaataggtcttgatcgatggaacgtcgtttgcttatgggtttagagatcttgttctcagtagtttgaaagacgcattgtccagcagaggctattcacctacactagtgctttgcgtgagcttgatgcatttagaccccaagttgatcgttactgcttaggtctgtgaatggaagagctgcaatctcagttctaagctgtgacccactattaagccaatttgaggaatagcaataaatcaatacggactcatagaaaatacagagattgcagcgagctgtcaaattataaaggctgttagctttttgtaattattgtgcttttctgtattgggtcagggtgtaaaatgtcttatatagcctaccctatttttattttactagaaaagatactagtaacattttggagtaatgtggaaggaaaagtagatttcactggctgcatgaagcccttatcagagtaactaatagaaacaattcattgagtagtcagatgttcaaataattaaagtgtgaaataaaacaaaaacaaaacaccttaagattgaaaaccttgaaggtagagaagaatctaagcttttttggtttatgtttaaggtttgctattctttgtacttagattattcgtgtggtttttaatggtttttcttagtgcctagagatgagtttttcctttgccactttcagcattaaactcaagtgaaccacagactgctgcaagtattaattagaagaagcttaaggaatgaggccatgtggcacaccccttttacatattaccgtaacaaggagtggaaagggacaggcttaattatgttcataaagttgtcaaggtcaccaggaccttgaaacacaggtacttgccaagtcaaataaaaaacctgatgatactgtcttcattttatgagaataacatcatcaatacttacagctccaattcactcttaggcccagtctagctgagaattttttaaataatctgataccttgtgtgttagtagtgtcaaaatccatactatgttttttttctccaacaacaaattctccaaacaaatttatgcttacatatagatacatacatatctatttatctgtctattcatctttgtatctatcgttatctatacatgtgcacattataagtttttaatatcagctgtgatatctagaatgttaaattctacatgatcagtagattcttaaagaatgccattttgatttcatcaaactgtaacctgcttgaataacctcctcctaaaagccctgacattgtgatagctaccaatcgagaatccttcatagtgtgggtatttctttcttccacattccttagatattatgtattatagagtaggctatattgtgttgaattttatagtcagtctacctatttttcctcataagctctaaaggccttgaagtttaccagactctcttgataaccttgtatctgtggttcctggaatatccttgataattcattgaattgaaagcaatattatttcctaatcatggccaataatttttagctgatcaaaaatgattttaaattcagttttagggaaatcattgttctgcagttgtcaatctctcctctaaggagcatagctgctgttgtggaagaggtttcacccatagcttacatatatagttctctgcaagggttcatgtacctctgattcgctctggcagagtagaggatcctttttattctgtgagtgaatttctggatcaggcccctttggggggggggggtgcatgctattgtttatgttatcttgctcttgtacagtcctacctctttggctgcctgtctctgtagatcgatacattgctcattgcagtggcatgatttagttatttgggtaaaaatattagcacccacacatgaatgtgtgttggaggaactgtggggctttcatacagcacaatgtttagcctctgacagctgtgcatggagaaatggtcacattattaggattcactttcacaacataggaacactatgttgagaataatgtgaacacctttaatagttttgttacattatatgattaacatctagaatccagactacagttatatcactgttgccttcagtacagaataaataacactaaaaaggggatatcattctttgcagagtttcacatatctatgctatgcataaaattctccatattataataatataaaaatgttttatcttctaagtccagatattttatagtttccatttttctttttacatttgaagttgaaggaagaacccaaagacatagactctgctaggtgcttactggctcctattcttaacctgctcacagccctttagagaggtgtgatgctagaagtcatgctgtgtatgtcatgagagtttctagagagaaaaaccctccagatgagtgctggtgccagcacttctgcactcaagcatctgactctggagcatctacagttatccactttgaaaagggatcatcaagatggattaaaaatttagcacttgaggcttattaagggttagagtggaataattatttatgtagctggcgatactgcagtcctcacgagaacactgtgatatgctgggcacttcctgcctcttgtcaaggcctctcacagtttttatctccctaagaataagtcttgctgttccttggttgttcatgcttcctgctttcttactgtgtatatgatcagaggagataaatcttactgaaatcctatgaacatacagctttgtaagccatcgttccttgctgtgcagcagttgtctacctcagatcaatgaacctttgttctcttggtgctcaaaggagatgagtgtggactaggccttcagactacatccatttcagttgttgctaattatggagccaggcttgttttttttctaatcttgaaagttggaaaataaaaggccaagaggcagtggtggatcttggaatgccactcttcatcaggctgtgagatattatatattgtgactgcagttttgtgttttggcaaggtagcatattaactctaacagaaaatttagtcaaatctagttttaaattcttgaggatttttgttctttcctttaaaaatcttgacctatcagtttcttcctaagaggccctcttagtccctaatctgcagtttcttcatttacatttttgaaaatccaggtagtattgctacactctagaaatattttaaacattttaaaatataatttttgaaatatagtcatatagctgccccctcttcttcctatctccagacctgctcatatgtctcactccctgtgtaaattcatggcctccttttcttttactgtcattaatgtgtctttgtatataagtgtgttcctaaatacataaacatgacatatgtagtctgtataatagtaccttttacttgtgtgtatatacattcaggtctgcttagaacagaagaaataatctacccgagagaaggtaccaattggttatgtaatactaaatggtcagccctgaaaacaatatcagtaatttaaaaatggagtggtacttttattgtgttattttactgtataaaattcggcaaaagagagacacggcaaaactttctgttcttccactaactatctctgtgaggtttttaactcagtcctgtctggaaacttataaaagcaaaggatatgccatagtcacctgtaaaatatcctacccaagtgactagcacaggatggctgcaaatagataccctttgacttgtgttggatgtcaagctgggtagagtatacaacattatgaaaataagttaactctctcctcatgcccaagctttcctccatttgtatgattaaaataaccagttaatcccatcacaacaggtaggtcatatattatatattgaagaaataatgatttggaagacagtgtccaagctatgaaaacagtcatgaacataaaatgctaaaaatattttaattgaacatatttaagtaagttggagtagcacagtgacaaaaatcatatatgtataatctgttctcagtctgtactgttggactgaaaaatacattgatttgactaatgagattgtctgaatcattttacaagctagacagcaatattatggattgatttttgtctttaatcagatttgtgagtttttcttcctaatgcagaatactgaaaacatgacctttcccttaccatttataagcattaggagtgtaaatcaataattaaattgaccccataaaatattttgggtaatacaattgggacttttaaaaaatgtagcatgtaatagacaatcaatgcatctcagaagcacctttcatataagtgtgataagtgtatcagtgtaatgaatcacatttgctctcagcgtccagttaagcagtggattctggtagatcagctgtgggcttctgaaaaccagatttagtcacaagtcagcaacagatttaccatacgccaaatggggaacatgccagtctcactttcactttagctttctgatcactggttggttttctttagtatcatattcagttaaagtgtgtgtgtgtgtgtgtgtgtgtgtgtgtgtgtgtgtgtgtgtgtgtgtgtgtttgtgtgtgtgtgtgatttacacaggtcagcctctaacaaacattttatattccatttggatgctgtatctagtataacaattcttgcttcctgttttcccctaatgccctttgcctctgtcctgtaaaatgcctaaaattataaattcaactaactgcttctatatagcgtttctattttctttactctttgcatactagaaaatgaatccaaagttgagtttacttctaatgccatttggttttgtgagataatccttcttacaaggtcctgtatacttgttatttcatcatagcaaaaggtataacttcaattatccccactaaggatactgaaatctgtcatttcttcttgactcttgggaaaagaccaagggttggttggacccaatgtttttacttcattgttgatcatgttctagaaccatgatattttttaaggattacaaaggtttaacttttgatcatgcagttcctcctatgttactactagaaaatttctaaacaaatgctcttcttcagttttatgagacactatgcgatgtaatttgtattacattggggacatgcatgagttttatcaacatttaaatcaaatatcttctaatataagatctaaacaaatttacacataccttcaaattattctaggttatgatgcttcttagtgggtaatgggctatcttgctaaccacaggactggaccacagacctggagcctgaaatgaagcagcagaagtgctcgtgcctggcatcccaggcacagccgaacccagagctggcgggtcaggcttgcagcttatgctagccagctggagtctaggctccatcaaattattctaatatatttcaagacttttcttttgggaaaaatctttgaattgcttctcctgatcttttttatgataatatattttggtgacaatgcatttccatgatatcaggagtcgtctgacacttcgtttctgtttagcacagatctgttcctgagaatttgactctctctctctctttttttttccccatttgggtttgttttgtgttcatgatgcaaatgaaaaacataagacaaatgaaaaaaaagtccatatgtaaatctggttttccttattctaatatttggtttcatatattaaaatcagtatttttagctgacttcaaattccttgactttattatttaatatcatgacagtcagagaattgggggttggtgagtaactcccactgacccagagaaacagaaatgactatttggggcctaacatgttacagtaaaggaagtttcatttaaactaataactttgaagaagtaaaattagagtcaagagtactggaaatcccccctcagactaatgcaaatgggaagagcccacgaggcttccatgtagtgatatctgagcttcagctggcttctagccttaggaaataatgaagaaatgttagtggttttgttatctcttataatgtgtattttgtacatataaagagaagtctggggttcttaagataattgttggatagtaaacacatagtgtgctatggaaatctgggcttagcatttatgattctgttttgttagaaatgtagttgcctaagaacttcatttattattactgttttaggtgattcatctgtagttgattataccaaggtgatcttgtgcctactagagagctagtttgtagggtcagctctcttctccaatgttcagtagactagacaatggcaaattctggcactaggcttgttcaacaagcccttcctccagcctggctgtctcagcagccccggggatgttctgtcgattttagcatgtattaaacagtgatagcatttttgatgtcttctatcgtccagaaatagttcctttacttatggttaggtactataatccagctgaggttaaaatgaaagataatttcttggcataaaatatattttgcaataggaacatagacaatatagaagcatcacattgatttttttaatcatatgtagatatgtttatgatactacagagagatatcaggaagagatattttaaatcaaatggtatttgtatccttggctggcttaccttttctggacattttaaaagagggaaaacacagaaagctaggtgaggtctctggtaacaccaaggattggctgaatttaaagttaaagatctacaaatagatatttatgtccttcaaatactaattgcagttttacctggaggaaatattttcatatgaatagcacataagttcatgacaaagttcactaagtcataagtaatgacagtttcaaactgtggaaatggaaggctagtcccaaagagacaggagttccaaaaacaactggcaaaagtaaatgttatacaacacagaaaaataccaggagaagagctgatagactacaacaggaagactagtcacttgtggatggaaaaggtgggggtggggcaaagagaagaggagctcaagcagggtgttgtctaatatgcacatcccaaccccctgggagctgcactagcaaaaccaggtaatgccacaacaccaaagacacaaatataaagttttcaaaatcagtgactggattgaaagcaggaaaatgttaggcttgagtttacagaagctgacactaaaaggctggtggtggtggtcctcagcagagctgagcctcttagctcaggctgctaggttggttggccagggaaagaaagccttgcttgtccttcaccacacgctgaggctccgttcagatatatattgcatgtaaatagaagtgctctgggtgtctcatttgtgtgtgctctttgaaataacttttgcttatagagaacatttatccacaacttaagaagtataggtatccaaatattccagtagctatttctgtgagcttttaaaagtactagtagtcattacctgtatattttataaaaacggttctctataactggaaagtagacctctctctctctctctctctctctcaacctctctctctctctctctctctctctctctctctctctctctctccctccctccctctctctctctctctgtgtgtgtgtgtacgttttattgaaattctattaattttccattcatagtaaaaggaatagggatattccagaaactggttttattgagtctcctcacttgtcaaatgtgaataataagatgcctgactcaaaaacaggcaacaagaatagaatgacctggatgcagtaatataaaaatcatatgacatgctatgtttttattagtatactctttagccaagtatggcccaactgacttaaatgacgtatttctagcttacaaggaaggtgggtattagcaggaacactcttccttataccacttggtgaggtcatttgttgtgttacatatatatcaatatttagcagacatatgatttgaacttgttcatctcttagtaattcttataaattatgtcaaatatttttaatattaaggacacaatctgctctatttggaaaaatatacctttgtcagttaaaagtaaaaacaagtgatgcatattcaaataagatagaaaattcacttaatttagagactttagatttcatcttgttctgtatagctttatggaatatataattttgtatcattgtgctcagggaactgcagaatgcagagagccattctgatcttttttttaaccaattacaatacttctgttgttcatgagcccaaaattttctgagataaattctaacctctaacaacataaccaggtaatacaaacactgaaagtacactgaaacaaccaactcttcctgactcccctgccccatgcataatagaaagggaaatgtttgttttctaaactgtacagacaaatgctatctccgacaccgaaagtcttcccttttcctggtgtggacacagtaagtcatcctgagtcacttgaggactttatttaaagcatagaattgtgaggacagatgactcaggggtctatgtggtgtggctagactttctcactgtcaggttaccggttcccacacaactcactccctattaaatattgggggaatactttgttttcacgatgggagtgcattaaaatctcatctgttctgactagtgtgccctttacttgttataattgttattaatacatttgtttccatatgaagcctattcaaagaattaagcagagggaatgggcccagtcatagctcatgaatataagaggggcttagcttatttgtacacagatactggcttttctcttcttcttttttcttttgtgtgtgtgtgagtgaaatatttacataactagttacttgagcttgaatcttaacactttcactgccccagcatcagaaatgactatatggcgattgaacaagttctggatatgctgaaaaaccataatttatatgtttgtatgacagcataaataactgatgggttctcctagttatcactcactaatgccaagataataagataatttgtttagggggttggatatgaatctcaaaagtcattggcaacctgggcctcatcatgagatatgtcttacaaataaatcctttaatctatcttatgcaaaaaaaaaatctatgcagttactttatttcccttactgacaatatggaagaatatactctttagcatatttttatttgttaaattcagtgttataagtagaggctcgaacagatttaaatctgttattagcatgaataaatcaagctcattttatgtgatatcagcaccactatccagggttactgcagagaactctccacctccttctattttgattttagaaataattgagaataaataaactcttacatggtatgccatttgaagggagtccatgtaggcaccaaaataagttgttggtaaatgctgcccaggggctgcatttcataaagcttatggctaaattataaccgagggaaagttcatcaaaagaatatcctcctaaagtttccatagattctcctccttagttttgcctaaccaagcagtagctgccccaaaatagcatgagtcaggctcacagccagtgaaagaaacaggttggcttctgtattatttttgccttagcattaaggacctgtctacatgatttgaactgtctggtctgacagtcttatgtcctcagcagctcatttaaggaaggttacttcagctgctgaatcttcagggaagtcctgggtcaaagttggtttcagctcatatgtcatgggatgacccttaaatttcttaagttccatctgaactcataattatggtctgagccttgtatttaatgaactgcatgggcagagctgggaatgtgtaagtgtgactgctgcaatggtggttcttctgcagaaggggcactgctggtaacaatgctttagtcctgtggggccgtcgaagtcagggtctattttgaaaaatgtgacaactagatatgttcttcacatcctaacatctgacaggcataaaacatgtgagagaaatttgtccctctgtgtagacttattcctaggtccttttcccaccacagttcaggctagtcatggtatttatcactcccgctctgaagagctccagtactcagttttcaagagtctacagaggatggaaaaacagtgttgcaggtgcattccaaagtctacatttttcctgcttttcaaggattatgacattaggtgacacttcttacatgtagcattcaccttgctgtgttgatgtaaaacacccaagaaacatgccaatagtcttagttcacaactttgtagtttcaccaataaggccaattttctactatgcagaaaattcatgcattagtgttcataattctctaataagtctgtggtagaaatatgttaatctttttcatttcctcttgaagttcttaaattcctaagaaataaatctaggtatcttttctatttctaggattgaatttctagcaaatcatctagataccttgctagcagtgctcccacgtgccattgtccaatcatattctggtgaaaggaaatgatcagtaacatcagaatggaaatacagtatgggaacagaggagcattgctcattttgtaaatgttgcaagaactgatatctcctcatgtcgtcggagtgttgtacagattatgaaaacagtaacccttgagaactttctatgctaggaaggcagataagagtagattttaaaattgagcaaaatctcagggtagcaattaatttacatggtaagtctctttcagtgacaggctttagggcagttaatttgcttactaggaatgagaaggaaataaattatgaaagggctagtgcagttgccatgagataaaccttagagagcagttttctgtatagaattggaaactgagtatctcatggtaacagtgtttatatcacttgcttggagagcagatttaggtatgatcacaggacgacacctgtcttggcacttggtgtaggataagtgaaaacacatgggtagtctgtgtgagtgtggaatcaacaagaatgtttgggctagcatcttactgggtgtggatctgacagaactcaagctactgctgccacccactgctcctgataccggggaatggaagcatggctgaccagcagacccctaactctcagtgccatagcagttacatgagaggtgttggttaagggatccatcttggatccttttcatggcaccttggcaagcaaaaactgtattatccattgaagatgaagcatggagttgtctgatagacactggtgagtgaatgaggcaaactggaagctaattaactaagctaaagtgaggcaggctagttgtgcagaattccatgggaagaaggcttctgagactgtgtactttgggagcacgttccacactttagtgtcctcatccgtagccagcttatgtttcatgagcactgctggcatttactcacacataacgttgattcccaaactgatgcacagttcagcaaatggggtatagatttccatagactgctttagtctctacatcttctgtcctttacttgagtcacagttatactttcatagatgaaagtaattatttttttcatttctaattgtactcctgctttattcatactagttgagttcacattttaaatgaaattaattgatgtgcatgatttttgccagaaatgttatttttagacagagataattttgtaagcaaattagtatgatatatgcttgtatgaatcagatagttgtacaggctgtaccttactattgtatttatgcattcatactctgaatgagctagtattttctatcttcaaaatagtttattttttatataaaattatatttaccataattcatctcagatactaataaagtacccattacctgtgtgttcatttcattaattggaaaaaatactaatttataaggctacagactatagactgcaagttttcctagcataatcatcctgtattgataatgtttaagatatggtctttaaaaatctgtaataattacatttgagaacttaaatagtaaaggatctatcaagtgacatagaaaacatgctgaaattcttgttggccctttaggctttatgagttggctcccccaccccatcattagcattctctgcctccttatggtattatgtaggtgatgctgggatatagtttttgatgaatttgttaggagtatttaatgcttaacatttattcaaacatctcatatgctaacttatttactagcacattttatttacacaaaacaactactttttgtttctactgaatgacatacatgtagtcttaaaagatttataaataaatacattaactttcccattttagatcaccatttgcttcaacaagttcttgttatcactttatttagatgggattgaaaaatataggtgcagtaatgcaagtaaaattgatctgttgaatttaatctcaaggaccacattatggaagcgattgccctccctcctccagacataagggtccaaccactgttttttaagccttcctcagtgatacaatgtctggaaatgataagaccacattcaaatcagaatttaagtgtactgaagcaggcttgctacagggaaacatagaggctttgcacagtatctctgtgtacaaaagatacttgctctacaatcttggagatccacactcatctccagaagtcataaacaagtggaaggacagatttcatatataagtcctttgccttccttgtatatgccatgtgctcccacatgccatgtacacgcactcgtgtgtgcaaacacacacacacacacacacacgataacaattttctaaaaatggaaattgagattacttatcctactcccctttataaaaatctggatttctcccagattaaaatatttgttgcttaaagagaattgactaatttgtgttgttagttttattttactttataacaatagctggtgtttgttgacttatctgaaatagatagacttaccctccctcaactaatgaggttcatttcatttattcttaactgtgtatattagaaataaggaaggaaattaccatttgttttaaaaagagtattttaaatactcattaaattacatgggttttaatgtaccaactaaaggaaacattattagattttaattgctctgaatttgaagttgatattgaagtgaagagttactcacacggacctgctattatgtaatagggtcttttcacacctgtgtccaaatgtctaaaacaagtctaaaatactctgtatagttaacttgcttctaattttaaaaacgtcaggatggctaagttatctcagtcgttttcatttgctgtacgttagatagagttagcagcttctcagtgcttatgcttggttcccaagttgcaaacagagtcaccctgagctctgtctccgcatgatctagctctcgcagttcatagtaagcggctcagcgtaagttcctcccggctgtgggagataagagccatgaggactaggtatcaggttctctgcaccttcctgggaagagctgcgttgtgaggcccaggcagtcagcagaggcgtgtgcattagagcttctccctagtgaactggcacacttgattcccctctggtttttcctcctttcttagttccatctcttgcccttctccagcttgtacactcctggaacacctgcctcttttctatcaaattctttccttcatcaaactccccattcaccctcatctggctctggctgcaagtgatgtacttgatgaaatatgtgttgcacaattagaaagtaattatttttctcaagaagatttttaaaaagaaactaattgagtttaatctctgttctgtgtctattttctcttccaattccagacagctttggctttttacctcttgctgtggaccagcttcctgggattttttttttttacatttgtacattaatttaatattaaggttgcaatgacagagtatcgtaatctcatacaacttttgaaatgttaacattagtccaacaggcatgctataacatgtgtccctcacttttctttctagaactagatctccaccccttcatccatgttttggctttctgtgggatgcgtgaatggctgcccccttgtattttgttgcacttctccattgcttcttgtgttctggtggggaccttggtgattcttctcaattgctacctgagctctgtgctggttgctgctcatctcccagggtcttgtgctggctggtcatgtctctacctccttggcactgccccttggcagaagcgtggtcccttgttggctgcgtctaaacccttgtgagggtggggaatattcctccccctgctgctacgattgagctctgtgctgggtaccacagagtcctctacacttgctttcagttgctaaggcatcccgagctttggctgtggctcagtggtcctgctatccaaaccctaaaactttcctagcctcgacactcagtggtagcagcaggtgttgggatttctccaacttctaaggccttgggaggaagagagtggctgttgacacagacctcaaggattttcagagtacaccaggaaacttctccagaagatatgtaaaggtaagattctgatttctctaggaagcagtttcagaagcatagaaaacaaaacctctaagcatgggttaatgtaaatggattttcatagaggataccgagaactatgataacatagacaaaacttgtcctgcattgggcctctacttactgcaaatacttcttggaggtggggtggttctgggtgaactttacatttctattctatttttacccctattaaataattggcattnnnnnnnnnnnnnnnnnnnnaaataattggcattggagagtattttcaagtaattgtactcaatgatttgaattggaattttgaagcattttgtttctccatgttacaatcatcactgtatatttagtaagattgtttttgaggtttaaaatattaaaggataatgtagcaatcctttattttataaaggtacctgtatttgagatagcttgccattaatatctaataccaaaaacttattaaatgagtgtttccttacattctgcccaggaagcagaagtggagctctgtcatccgggtagtgctagagcacacacttgtgccttgttggcattcctgcagcatgttagagccctggaacaatgcaacatcctctaacctcttaggcctttctttctctccctttctctcttcccttccctcttttattattgttattattattattattttaaaaagaaggtcttgtagtacagctaacacccacccttctgaaatttactcttacagtccagccagccccagcacttcgtgatcttctgtctctcagtctgcagggctgggatcacaagtgggatacagtgtgggcctgtttacagtgttcctcatggaaaatgcacctgggactgggtaaagaatctggattaggtgctagtgttctctgtttctgagttgtgggagggcagcagtacaaaccatgtatgcagaagcacaaagcctagcacaaagccagctcctaactcgtttctaacttactcttcactgtgcacttcacaggcactaacccatgagctgattttctgatttcagccttatcatcaattcatagcatctttttaccttctttgattttttttgaagtatgaacttaatatcttaaccaatgctctatcattgaaattaaggctcttgtttagaaaaccaacctaaatttagtactaaaattaaaacatatacttaccaataactttacaaactgaaaatatattgaatagtatttatttctgttctgtcctatgttatattccctttagactgcaaagaataactaaatagagtgttttgaagtttttatagtgagttaaaatgcatatttggtttcttatgcaaaaatacaaaggtggcattttattgttcttattcttaatggttatgaatgcaactcatttagtcattaaataaaacaaaaagacttgatatgaagtccaaggctaggagtttgctttatgattaaatgtgccttgagtccaccccgcttacatttctccagaaatcttattgttccttaggatgagaaatcagatgaatataagaatgtgaactcttaaaaataacgaaaacttgcaaattaattatgaatgataatgattgcagaaggagcctagttttcctgttcatagtgttcatagtaagcctgtggtgcatggccctgctctcagaataaggcccagttagagtttctgcataactcaggtcagcttgaaacttgtgcttgtctgtcccatgtttcctcttcctttgtgcagcagaaacctccaaacagaggggaataggcagaatatttacagtagatgcttaattaagcaaatataaagttcttattatttagtttatgttatgtaataagaaagtcaaagtgtgcaaccttcactagacatgcccatgtagaaaaggaagaaaggacagacctgcgtttcatcagagcaactcaatggaaagatgaatatagggctctgaccagctgctgacatttttgtttatttataaagttttaaggctcaaaagcaaagcatttctatgtattatccatcgtgtgtggaactaaaagcttattggttagttttacagaattaaaataatcttttagttaattttcatattttataaattgcctaccttagaatcacatacattttttttcttgaaaacttgagatagggatgagagggagaagcgagggctggggtggaggggtaatgggagatcattttatatctgtaagacattttcagatggaattcgtcaatataacagaaaggtactcaagatactatttttattgcaccatggggaagacgaaactgaggctttatgaagttgagcctaccatgctcttcactccagggctcactgacgccagaaagtgtagctgcagaagctgttggcaggatcattgatctttgaacattctgagcatctagtgcccccttctctcctcatccttggaatagcacagtgccatcaaggaaaatcaacacagcccccatctaggtcattctaggctcttattctgtatctggctttgtgaccttgggatatttacttacagtctttttcagctgtagtctcactctctctaatatgtgaataacattatctccttgtcagagtttttatgaagatttaatttaatgaaacagcttgtgccagtacttagcacagtggctagcataggaaaatggcgattgtgtggatgttactatgtaattttcccaaggtcacactgttagaaaaggattgagtcacaactgaaacacaagtctctctgaataaaatagtaaataaaacgggaaaagatacaagtacatgcacacccagtatgctgcagaaacttcaaaagaaaggtcatacttccaactaataaaagatattaaatgatacgtatgcaaaccacaggctcaaataactactggcttttattaacagttgacctagatataaacacctctttaaaagcatagtgtctttatgagattgacaggtctggttagtgaaaaccgtttacagatggataggtcttccattctctaagaaccaaaaagttgttatgtcatgacatagactgtcagtgggaagggaggaaaatgtcaaggaatgaacgcaaataactggagaggggacagaagttctttttcattttgcctgatgtttgtttgtaacactggagtgcccccggtagcgagaggaatgccagttgcacagatgatagaatattcttatgatctttattctctgaagcagagcagaaactagcagtgtctgctcgtcctgaagagagactcatcaaagctgaaatgtcaggatttggctttgaatgcgatggattcaagaggtgtatttgtttttttttcagtgaaattcttgctgctctttgacatcctttactagacttggaaaagcttgaggccaggaatgtttatatatttatcgatttataatcttaacacggtgtctaggaaagaaatggacattcaacatatgcttaattacatcaaaggaaatgtattgcagaacagagtaagaagactaacgttagggtctaatggcaccaaagggattagaaagcaaggactcaagactcagtctaaatgcaggggcaaattagggcaggcgcttcagcgtggggagctctgtgtttgtattttttggtgcctggctaaggatgtagaagaactaaaacctgcagtcagctgttagtgcaggagtaaaatgttcagcatcactcatgagcacacagtgcaattggagaatagagaggtaaagggactgacctatactttgtttatgtttttcatgccgaaaagtatttctggccttagaactcaatttggtgcccagagtatggagggaaaaactattagaaatataccattggtgtatatcttcattaagaaattctgaaaatatggtttaaatgtacaatattgtaaattgtaacttgcaacacataaagtaatagagttatgtcgatgacagagaaaaagtataattctaaaaagctgaaatacttaatagggaattattggaatagcattgatatttgttttgtaataaaactctcactgatctttttatgtttattcacagatatagtaagggaaaggcatctcttatcctttatggaaacaagaaaacttaaaagaacaaaggaaattgcttcattttaaaccgaacactttgtgttgatacaactaaaacctcaagtcaaaaactgaggctcctttgggctgctccccttcccaggaggctgtaatcacacccttcactttctgtttaggatttgtggccacacaccagtgcataagggccagcatcattcactgacaccattcacaggagggtttccgttgcatataagaggcacttgagtgtttaggctccatgcagtcagtccttggatccaaatcctagcgagtgtgtgctgtcacccgaaaagagcatatttagaaaatatcagatgagagtaaaaatcaaaccacatgagcaaatgttccaggaacatttgtatcttaatttgaaaaagaccatatgttgcagcagtacttcagtaagattaagatagtgctgaactttccagaatatcatcagaacaaacttaaattgactgcacatttcaaaatattttgctatacaaacatacatggatgtgaaggtaaacaaagaactgagtgtgaatgaagcaaacttagaactaacacatgcaccttattttatgaatgtgggtgttatctgggccgttattattgatgcaaatgtggctgtatttaggcctttccattttgcttttggttgtctctgtttgaattaaatagtttcaatgtggtggcaaggctgtcttacttcacttaacccatggtgagttttctttctaactttgtttcttatttttatttacttgcttttagtttttgttggcagtttgctatttgtgttttaacttggctataatttagaaatattattgaagtagtacatattaactaataaaaatcataaaatcttaaagtctttcacatgtgaaaacctcttagatatatagaatgcaagctcccccctcctaattctttgtcaaagaatgtgttcatggcagtttaatttgctttattctgctttgttataaatataagatagcatggtataaataaaatcagtgaggcctcttactaaggggaattttgtcatgagaagaaaaagaattttgtcatgagaaggagaaggtcaacatattctaaagtgaatataaacatttagagtatataagatataaattacagaacttttatgccatttataacagttagaaatgtttagccttgtggttaagaatatcagttccacggccagagaagcctggaaaccctggatttaccatgtaatggttgtgccgccttgggaagttacttgattgtgttacgttagggaacaccagattttcagtctttgcaatgggtataatcctacacgataggattctctgaggattaaatagaagtttgaatcacatcaaaccatgactagaatactccaaatactgactaagaggttgttttcttctaacttcttttttaataagagagaactgagggaagtgagtctgagatgaaaaaaaaatgaacataataaaagctcaacctgtctagaagtcagacctgtacagtagcatgagttcatcatcacgggggagagagacagaaatcaggccaagtctgtgacagcgcttgctgttgtttcaatagtgcttcttggaaaaggttatcattcccccactgaacttactcaaggtcagccctgcaagcttacatcacacagatggcctttatattttggtgaccttataaccctgaatcttcagatacttcacctatcacaagccagatgcattaattttggaacattccttatttattttctccacattgtcctcagttttctggtgaagggttcttttatagatttttttttgttgtttttcatttgctattgtcatttggcataagcatggtgactatcacacttactacatatataggactaccactatttttcatggagtaacttgagtgttagtttcttattcgacctcttaatggctaatttcaggttaggaaaacatggttctgcagtaatattttgaagtttgcctaggctatttggagccaacattaatgtgtatttcaaaaaatgtagattggccagaaaggagttcagagattcttgactgaaaacactgacatagtgtaagtgtccccgtctgctgtgttctctgaggccataacagaaagctctcgggacaacttggtgcagtgggtgtggaacatgggtcatccagcctccacacatgatccatccaaacttgagaacataggcttttatttttgattttcaaagtctgatgttgaaagattgagcttgtttcgtatatatcagtataactttgcaattattctatcatgtttgcaaatgcttcatagaattcaactaataaaaaacactgttaactttactcatgttctgttaagattgtatcatagacacagatcccttgaaaagggcatcacagcccagaggtagttaacttagaaccattctagaacaaaaattattttaaaaatatttttactgaggacaaagaaacatttaaaataaacaataaaaatttgaagctgggcttagtggcagtactgtaatcccaactatgtgtgaggttgaggtaggaaattcaaagcctgcattggtctacagagcagattctccagcctgatcaacttagccaaaagccttgtatcaaagttaaaaataaaatattttttaagtgttgaggttagacaatgattgtttagtatattcaaaccctagatatgatacctacaacccctacagacacatataacaacaaaaaaagaaagaagataataacccagagacttgattattttaaaactaacattatctttgtaaaaataatattttatagttccttacgttgtattgaaattatccttctaataatatttaaattataaattttccattttaatcctacattgcatttaggtttcatattttcaatagtttttttttctgctagtagttcatatatgctgattcatttgaaggcaggttagtttctactgaaggttttttaatatatttggagtttttgaaggaatccaagagctttagagtgaaggagactggaagtcaggtaggaagacaggaagctaagcccagacttggagtgagttctccagctttctaagggagtttgggttcttcagagtgctgccttaatgactgtgtcttctggggctcgcccattcttcttacccaagctgcttagagctaatgatctaccccatacagcttgtaaagaactcctgctcttctagaagccatgcagagtgagtggaggtttagaagcaggttcaagccagtttttcccctcagctttaccatttcttatgagaaataaaatggaaaagataattatttttagaatttgcaatgtaaattttccacctgtttagaataaggagaagacttccaatgctgttttccattgagctaaatcatatatgtttttaaaagaagacaggtgatatttaaaatttggtcctaaggaatttcacagacagagccatctgccccaatgaagaaaatgtatttttagccaacactagagaatgtaggatgtagtttcctaaaattgctggatacgccaaatgtctgttaatgaataaatgaataagcaagtaaaaatttatctgggtggacaaatgaataactaaatttattagttgtgtgttcatatgcttctttattatttttaggaaaagaactcagcttcaagtgctgcaaaatttattgaaaaatgttcaatggaattcctcgtttctgtgtggccattgctagtttctgccccagggccagggatgtttgattgatggtgcttctgtaggtggaattatcctgcatgtgtagaggttttagagtaggacaagaaaacacagatcctaagcaagggggctattttgaggaaaggaaatactagttcgagtgatcacagcctaagaataacccatagaagtggattaataagatcacactggttgaaaaggtattaatgtgctgtgtcctgtttcatttggtgttggtggcaattgttagtaaaggaataccaagagcaatactttttaagcacaggtcgagattacagattaagtattgctgtttagagagttgggcttattgagcatcttaggacgttgttgaaataagactgactgcagaaaggaaccaaggttgaatgttgaagaagagattctgctgagtgtgtattagaggcttagcataggtatggttatttgaaatggagcatatagctatagagctctgacaactcttgaaacacctaaataacattttttcactgcttaccatgcaggtatttcaagctgttgcccttacttagcttggtatagagttaagttttagccaatgtaaggtactggtgttgtcttgattcatagctgaataaaatacttagtattgaaaaagaacacagaaatcattttagtaactagagtgactgaaagttcatttctgattactctaaagtagtaatttaatgtgacatttcactataatatgaaaaaaataaaaaaaagatgctttgttgtttcttacgcatcctaataactattcagttcctatttttcatagtcataaaatcacacagttcactcatgtgttatgtcagcaaagtagacactgctttgaaaatagtagcccttgtaaagtaggtgcaggacatgttttgtattatattaatgttgcttctttttcaatatggtggtaagaaaaaggatcaggtaataataacccgaagggtttgaatgctgataattaggcttggaacattgtctttgttactattagaaatattcataaaaattattgagaatttaatacacgaatacagtatttataacattttcctccttctccttcctccaatttttctcatctctctttcacgtctcaaattcatgacctcttatttttaaattataattggtgtgtgtgtgtgtgtgtatttctggctgacctcttgacctcttgggtcctcacccctagagaagactgagtctcacctcctcagtaacttaattccctgtaggtctttcagggttggagccttagaaggtttcccctgtttgcattgcatatgaatttggtggtggcagctcttagataccgtttaggaatagaagtgaatgtcagctgcaaacatagcactacggagacagctgttgagaacagtgggaccatacttgctgaagaacagtggaaccacagctgttaaaggaaagtggaaccacaactgttgaagaaaagtggaattacagatgtttcttccccactgagtaaggtcgcaggcatcagtggagagccaaagcatgaaaagtccctaactagacaatgtgggtgaagttggggctaatcagaatatggagttgtggaatttgaatttgaagataaaccagacactgacttagagaaaccaggaaagagattctgggcaataagattgtttttcttacattatcaattcaaatctttggggtctgtgtccttgtctgtgtgatctactgcctctgtccaaactttgttaatggattgctttaaatctctttacctctttgtttgctttatgtagccccaccttgacataatgttgtgagacagagggcctgacctgtccatacacacactggctgaacctctccattcatgggttctaatggatttcagacaccatgagtgggagttgactaccaggagatgagcgtgcagggctgttccacaaccacaatgtaaggcttcgaggctacttacctaagcaaaactttgtagcagtttccaaaacaaatccttaattcctagtgaataagacccattattatatcagacatttattgtcattgtcttcagcctgtactcaggaaggcacagaccttcactagaatagttaaatttatatgttaggctaccttgtggtgaaagttaaaaaattaaagttgtgtttgctgtaatgtttttttttcccaagaattaaaaacttgttaatatttcattataatttagtttcacaattgagatatatttctgaaatcttaagaactcctttgttaatgtttatttatatatttatgttatagtaatgtttaacattatactcttatgtgtaaaaacacaggggaggagtctaagatggttggcttaaaggtacactgctggtatttgagcatgctttgctttcacacacattattatagatgacagttgtactaactgtagttcagggctacataaaatggtatttgaaatgatatttaagaaatatataggtgatgcagcacacaaagcatccacactggccttccatatggaaaagcctccttgcaggttattcttgttatatattgaaccccattttgagctttagaagtctgtgtttgataccctctagcattattctgagcttcttcatctctactgatacgtttcttgttgttttttttagtttaggaaaaagtttctaggcatagactgtctactattttcacttttttgattcaacattatatttaaagtgaaaagtatcacgattgtaatttctaaattatgtaaattacaggtttttaattttagacacttgattttatttccttgcaaaccctttgttctatttctcttcaaagtagtaaaggaggaaagatggaaagagaagacaaaatagttagcatgagtaaagaaagctgactatattcacatacacgtgttgctactgattttaatcacttaaaatactgattgatcttcagtgtcctgtcactgcacaaatataattcctttcagatgcccctgagaggtcagaagaacaaaaggccctttcctgccctgggcagtgagacattttataaagtaaaacacatctttgccctggcttacctctctcagtctttcaaccactctcttgactgttctccggcctccctggagtgttaaaaggtgtttctcttacattcctgcttccacattctcttttatctcttcataaaaccttttctgaatgaggacctgcatcacagtcagctcttctgagagcctctgctgctccgttgctcggacactgagcgatgtttccacatcacatcatcccacattggttcctagtgtaagtacttacctgagatgcaggtcggactgacactttgtggtgcgggaatttccttattctggaatagctgcttagtgttgacattaaaatatattttatggttctttgggatatacatgggcagaaatgttctgggctatgtcagtaagtctgtgtaagtcagctttgtgagtgacaacttacaacaaagtggaaatgtaagccttgtagtcaagcacagacttcacctgtgaatgtcagatagaaatgtttcctgttagcgtgtcagatacagcaagctgtagtcagtgagcaggtctcatcctaacatcagcgcttgactccaaacagtgcatgtctttgagctgtcaggtgtgcactccattgtcaggggcctcctagatctgaatgtgtcgtacctccattgaacatgcaatgttgagaatggctgaggccttgacagagttgggagaagaacagtggcttctatttatctctgctcagaagtgaagcccccatttctccttaggttgtctgagctagaattatcctgtgccaacttaatgcagcagagactgggagaggatgtgttttgcatgcagagatatagaggaaatgccaagaacttgatataggcactgcatttggtttctcctcttttccagttttcattaaaagggttcatgattgcaaggggatgttatgaagcaaatgctatgtggccatctcaagtaagaaatattaattctctggaaatttattgaattcttgttataattttgacatgttaagcactgcagagtgtatagattctagcattttgggctagtagcaatttgaaaattgaaatgtaacaaaatacagggtttaccttgcaaattcccccaacagtatgtactgtatcagtttgagcagtggttctcaacctatggtttctgaccctcaaagaccatgggaaaacacagatacttacattactattcatagcagaagggatattacaaatacaaaatagcaacgaaaataattttatggtaggtgggcaccatagcatgaggaactgaattaaagagtcacggcatttggaagggtgagaggcagtgagttagagtttgaggccatactctgttaggaacgaacaggaaaagcagagaggctgttccttagtttgagtggaggaggtcaatgcattgctgtctagataggagctaatggaggatgggagatggagacaagattactgatgcatgcataatcagaagccagctgagcaggctctcttgcggtctgtcctgtgtgagactgtaataatcaatgtgttcaacttcctgttcttagggctgtattgcagagatggctgtgctctgtgttaaaacattatatatttaagtttgtggatcatagagattcatgacagcaatataagacctttccatgacttatttgtatatttgggttttccttattctttaaaattatagggcaaatacctttttttttttttttttgcaacagaattttcttgattgaagcaatgtggatacaagtgaaattataaagggacaaaaaaagaggtgtgtgtgtgtgtgtgtgtgtgtgtgtgtgtgtgtgtctgctccactgcccaggagacagaatggcatcttgtgcctgtttctgtatggaggtcagaggtctaggatcaattcagcatttattccatgagcctcagcccaccgtacttattttctaaatatcattctgtcctaaattacaaaccttgctttgctatccttctacgctgctagtagatgtgattatagtgagccccaaggcgaggcacattaggatctggagtaatggtagctattgtcggggatgctatttgtgaccaatttttagaagtccgtgattatagtcaagtccacccctactcattaattatagattccttgattagccacttcacatcttggagctggtttacttacctctagaataaagtagcatctgccttaattactttcaatgactgttgtgacatatatagaaaagaaaataatagtgtgttgtgtcaccaaacagttgctgctttctcagtactacattctcactcctaagaggttctcatgagcaagaagttcagccagacggttgtctgggaaggcactgtgatggtttcacttatgactaaagttctaggagtatgtgtatatgtgtgtgtgtgggggggtctataataggaagaaagtatggaggtataacaagaggaaaggcatgtagacaacagtgtccaaggaatggaagcttagtggtaggtcatccagttttctcacctccccttcccttcctccagaagctgttcccacagaactgtggctggagaccactgaatgagggagtgaagtgcctgactatggagatttaagcttcagtgagaggagaaaagatgattgtatcctagctgcacagagttggatataggttggagatctggtgttacaatttagccaagcagagagagggggaaagtcacattgaagtgtgaaacctggggactgagtggtctgtggggcagaaaacagaggtgggagtaaaggcagaagctcaggacctgataattattctttttaaggtgagaaccaattgagatggttgtaggagtgttaacgacttttcctttgattcataatgattaaacatttttaaattccttcctggttatagattgaataataaaaaaagcacaactatgtcttttctatcaaaggatctgggtttttgaaaactaataaaattatagaagtgccatttgctaaaatcacactaattagtgtatttgactaatttcctttgaaaagaaaacaacgtgactcattgaaaagctagatttacctctcataaacaatgactaaagtcaccctggagattaaaacttcaaatacccgaactaagacatcttaagctgctacacctgttctgtcatttgcccgaaactacgtgtataagcaagaaagggggtttgctttccggtctttgctgaccttacagagactatatatattttgacctagtcacttgggcaggacaaatcacattgcaaatgtcaagaggcatccaagcctttttccttgccaaagatggttcaagtaaatttcgataaataaataaatacaatgtaactttctcacatttttcagtcagtttgactttgtcacttattgtcacttcggttcctgattgctgtgtggggatagatgcagtggtacattgcttagcattttccccttggaggggagagaacggagctttgtccagtcagctgattactgcggggtgaatggctcacgttgttattgatttcatactacttccatagggaaggcactggacctggagttggccaggggtgcctagtaagctatggagccctgtggactggtcctggcataccgcaggaaggacaaacatcctaggaggatattggagctaaggtgtggctttaggtattttcaaaggtattgctgcagtggttctcaaccttcctaatgctgggatcctttggtacagtttttatgttgtgacctccagacataaaattatctcataactctgattttgctgctgttaggaattgtcatgtaactatcagataggtatgatgtctgaaatgagacccctgtgaaagtgttgtttggctactaaaggggtcacgattcacaggttgagaacctcgggttattggctgtgatcactgtgttccagtggaaagtttctcagttactgaccatgattttaatcgcttgaggagagtctagactctgagtaaaccctccctggcttctagtacctaactgccatttctgcagttagactgatttcttaatataaacgtctgagaatagttcttttcctcggttcatcttagaatccattccttgcgaggcttctctaattaggtgcttctgtctcccagacctcagtagggattcctcttcggcgtgtctccatgtggttcccactatgttctgttaatccttcattttctcatttattattttaactactggctattttttcctaaatgttaccttgggaagttttaaacctgttcagaaatgatgtgtgtgtgtgtgtgtgtgtgtgtgtatggcattcatgtaagtttactaattgttaacattttgccactatttttttttactttagtgtgcatgtgtattatgtgtaggtatatgtgtgtggtgtgttcatgccatgccctgcgtgtgagattagaggacgattgcaggagtcatttctcttgttttcaccgtgtagacttgaactcaggttgcaaggcttggcaccaagcaccctccagttgacacagctcacgagccacattttgataatttgtgtgtgtgtgtgtgtgtgtgtgtgtgtgtgtctttgaaagaacaaagcaatacactcccatttcttttgttagttaactttacccagatgctgctatgtttgacttagttatacttcacaacttttgaaggtttcctcttgattcatttatttgtcaaacaattagagctataattatcaggtcctgacgctaagctgtgaagtaaacagcctgactacaagaaggggaggggggcagagacagagacaatgctgggttacctttgaatgcagttagaggagcccatatgttcttctctgtcattcatccattcactgatttcctttcttccgtcacccacctttatcatttacgttgtaacaggctctttatgtgctgctaagagtccttgactcttaagagcataatctgtgtccaagagcagaatggatatttacttatgcggggtactatagaaagggagacaagatttgtccctccgtgtttccgacagcgatttgtagtaaggaggaatgaactaagcagataaggaaaacaccattgtatttgaagccaaagaagcatgaaacatacagaatatcctaaggaaccagggaagctttatgcagagcagcatttgctggggagctgtcttcagtcaaggaaaagccgcagcttggcaggtggtgtggcagagatctcccacgctcagcctaagtgtataaagcggccctgactgagcctaagggtgatgtagagcagatctgtatttccacaaccttaccctcaaaacaccgagcaaagggctgatcttgccgtttttaattcttggagattaagcctgtttagtagcagccaacgctggtattacctagtttcgttactttaacaacttatgcccttttacccattcctgaggagctgttggtaactgatagctgctgcaggagggcaagccattcttcattgagcctgtgacctctgctgggtctccagttttccagcacaggacctcacaccatgcacatattggccatactaattagatggaactagtgggtgttgttgttaattttctgttgttttgttttgtttttaataagaaagcatgaacttggagagaggggtaatgagaagctgagaggatatggaaggaatgggagggaataaatgaggactgtgggtgcatatggtagtgtttattctcagagagtaaaaacaacaacaacaacaacaaaaaccccacaaagttagtttcacacctacagtaagaaggcataatgaacagtttacagttgctgcatttcgcagggacatagcattgccctgggtttctccgtctcagctctgtcagtgttgtgttcataatgagcatttgtcctaggtccattccttgctttgtagagtgcttggcagcatccctgggtggcctcttcccactgcatgtcaatatgccagcagtagtttcctcaaacctccagctgtgaaaccaaacatgtaaagatgtccttgattaaaagctaggcacttaattaaaaaaataagaagaaagtaggttacttaccttcctgtggacttactgcatttgttaatttcattgtgttgcttttatcatagtgtgtgtgtgtgtgtgtgtgtgtgtgtgtgtgtgtgccatgcgcacatgtgcatgtctctgtggatatgtgtgtttatgcatgtgtggatgtgtgttgttcatgtatgtgtacttgtgagcagatgacattgtctaataagtgttatgaagtttttaacagttttaaagttaaagtatcatgctggaacacaatatcatggaaaccaaattaagaatgtgatgctctgtaacagctctacatgttcacagaacagcagcagaaaccagtaagagcgaggtcaagaaatagtcctggccactcacgtgtaccataccgggatcagacatttcttttaaaattgcagttttatttaaaacaatatttttgtctatattttgaaaattattaataggaccaatgggatctgcagatagcatcgggggatatgaattgaagttcttatgcagaccttgcatactcagagcccgttctttattctaaagtgttgacttattaaactcctggattcagaagacctctcagatcagtgcttcttagccttcctaatgctgtgactctttaacccaggtcctgtgttgtcctgactctcaaccagtaaaccattccattgctacctcttaactgtaactctagccaggtgttaagctgttttacatcctttatctcttcttccccttcttctctcttcctccttcctgtctaggccccaatttgaaccaaactctaggcccaagcacaccaggcagcgctctaacactgagtcacacctgacccagcagtactcattatttgatgatcactcaaggatggcctactccggttcttgtgataagaaaatgtcagtatttgcccttttgtttctgaaccagtttaaacatgtgataaattgatcacacagctaatggcccaggaaatacaagttatatagacacggtaaccatgttctatccaaacctttttattccttttttctaaaatgggtataagacaagtagtttttttaatcacaggatatagttttaatatttctttttttttccatgtataattctccaaaccgaattcctccttccttttccttctccatctaagccactgcttctcaacctgtatggtgtgagtcctttgggtcctgtataacagatatttacattacaacagaagagaagcaaaattacagttaagtggcaatgaaatcattttatggttgaggggtggtggttaccacaacatgagaaactgtattaaaagctctcagaattaggaatgttaagaacttgtgtgaggagtatagccgccaatgtagtattctggcttagcattgcctaatctatttatgatgatgatgatgataatgatcgtgatgatgatgtaagattctgtaatacaaggcacacaataacaatgcacacaatgcagctctagtgtgccttaggagaactttatgtctttattatctcagcgattccttgcaagggcactgtacagccctcctgacagctgttatatccctgcagtttcacaggtggagtgaagggagattagggaggagaggctccttagaagctgggcagcagaaacccaccctgtcagaacacaggaggaagctgtgacaaacctgccatcccagctgctggagtgtccttcccagctgaggatgcttaaaggacatttgatttgaagatcggaatccacacacacttaaggcatttggtttgaatacttttcctgtaagcttgttttctgaactcagtccttcgaacgtagctctgcacgacatgtttttaaactggctgcactgggttttggcgaaaatcctttgacctgagaggacagagggtgagtcagagccggtggtgggctgcagaagaatcgagagcaagcctgtcctagcagggaaaggagtccagtttccagtccttggtccttccttttgtgggctgtaataactgggagctgtgtgtgtgtggaggtgaatggacaatggctcctgctgttgttttaccacgtgtcatccattttatgccttgactgagaagctgctaggtgacttaactgctcctctgtgggttttgcattcagcacctaaggacagaatggcttggttggcgctgtcactctcttgattcagggatgtttaggccctttcatttccaaattttgatacctcacattgcatatatgagcctttaaatcgagtttatcttttctgacagacagagaagtaactgaaccatgtatccatggtaacttggcacatcctcagtgaagttctcttgttcttgggttcttttgtttttcaaaaactatgaattctgaaaatggaaaggagaaaccttttgctaacttcacttttcatcttaaaatctgtttgtggacaagtaatatagctgtgacatgggtaggaatggcattctgatattttaactgtgtgtgtctgttaagcatattttctttttattttgttacagtttttaatttttttgactttttgtattaatatgctgaaacttatgcaaaaatataaactagtacctgccacagtactcggtatctaggttcaagagtttccaatagctcttcattgcattttgagtcagcgtgacacacagcgtattgcggatcatttgattcacaaatacttcggtgaatgtatagatgactaagatttcttccaaacttggcggaaaaacactatcattgtacattcctgtacacataatgtataaatgtcaactatacattagcacgtcatcttttgaaagcttataatggcttaaaattttcaatatattcataagtcactttattaatcagatttttgatcaacctgaatgacattgtgtgtgtgtgtttgtaagtagtattgaattcagaatggaaactttcaaaggcataaaaccagtctgtgtcatgacaaacatgtaaaaattggcaaaactacacaagccttcaattcttgatcaacaaactgagataattgtctcgtactaataaaaatctttcattaagtcttaagagctatcacacacacacacacacacacacacacacacacagagagagagagagagagagagagagacagagagagagagagagagagagagagaatgacttcagtgattacagtgaagctaagaggcaggaggatctgagttcgaggccaacctggtttacatagtttcaggacagccagggctacacagagaaatcctatctcgaaaaacaaaaacaaataaacaaacaaaaatgctaaataggctgttaatcatagcaatctcagccagaatttttcctgccacttgattccagagttacaatattctaaccttgaatttaaataccatcagatgtgtctgattccaagacagtatgtctctgatttcaatggcttttagagcaggtagacagctttcactgagtgggttttacaagttgatctttataccacttaattttactcaattttaatcccttttaattttgctatgtgagtcatcttgcttagtccttcagattataatgcagtagccttaccacctaataagaaggcagatacatttccatacctgaattaaactcatgcctcacttatttttaagtggtctgttggagaatgaataaagacatttttattcattgttaaattctggaaatgaatcagtttgacgatgggggcttttctacattataacagatacagagtgcagtttaaatacataggcacaccagagaagcaaatagtgcatccaattaggaagctgagccttgaatgtcacagacatcttttgttattgtttagtcactaagaaaatgagaggcatcagactaattgcttcctgctgtcagttattttgaatggtgaataaagacagccacttctttacattgccttcatttgctcagctcattactgatgctgtaatagaccactgttgggaaggaatagtttgccaaatattagattattttatgtggtaaagagaataaattgatacagtattcataattcagagatggaattaaagatgtattatatgcttactcaagatgaccaaagctgtaattccaaagtaaaagtgcgttagacactgtttatatgtggtctgctaagtgatttgattaacttagggaaaatgttgatttttccagggaaaagaaaacttatgtttccattctaaaaatgggtttccaagttaaaaaaaaaaagtaatgttaaaattaagactcggtgaatattgcaaatgaccataaaacagtgtggacagcttttcctgtctttggactcaggactgttctatgctttcttcttttggttcagcagtagcctgttgaagctcatgctaagtgctgagtcattgctagtgtaaatgttgtcactttgtccttcacacatagactttgtcaggatgaacatctcctttatcttttttatttagaaacatttcatttaaaataactataaattataattaaaagttaatacccgaagaccatacacactctcatttctattttgaattgctgtttggcgttgcaggttgtgtttttaaaattgcaatgaaagacctcactttgtgagatgatttggatggcaaagggaattttttcatttacatctttttttttttttcttttcaataatggtcactggcagtggtccaatgcagacaaaatgcctggagcctcctcagcagagccgtcaacacccttcctgcagtcagtgtcagcctccagcatctctgcagtcgttcatcagcactgtggcaaatcactgctgtagctccatcccatggcgtgtctgacatgtcctggcattttctttctgtgccagacaacccaaacttagggtatcaagatggaactgaaggaagtagactggaaaatgggcacattgtgattctcagggaagtgaaatggattcgtaactcatgaataaaatagggaaattttactaaccacgtaaaagttttcagtgtggacctgagcatgcaaaagcagttagaggagaacttagcatgcttatgcctttaacagtggatagggccatacgcctacctcctgcccacagctcccctttcagaatagggactgggatgtcagagcaactgttttgtctgtgaaccaagacaagtggcatccattgtgagataaaaaataagagtacttctaagatgaagacatgtgcattgcaaggtggtggagttctgaagcctcctttaagaactgctcttgatactctgtggtattatgtcttccttgtataaagcattgacactaaaagactcctcttgtcaaccagtgtataatatctgcacaatagagtgcagagggctgacgtgaattccctgaaatcataatgtgctgcagtcagtagatcatcagtcagaccagaagagcaccgctgattacccactgaattatgcatacaaatatttgcaacatcctgagtaattaactcataaaaataaacaattaccataatggagattgagtgaatttccatatattttccactcctaaaaatactatccagctggttaatactattatatttcttaaagagaaatatttagatacagtttttgccacatgtattttccatggctttagaaaaatctcagaatttcaaacgtaaggatttcctgaggaagattagtttctattaaatttttctggtatatacaaaacttaggtatttgactctgatatctgagaaaaatacttccacattttgtattgagataaattaaattgtattttatctctatggtgcttatcttttgcctaatacagtgatatcattctgtatctgtagttaagctgctgtaaatgaccattttcgttataagtgctaatgatactttttttggacacctgatagctaactctgcttcaggagcaaacggagatgtttacactggactcacttgctgactcatggctgctggagcagttccaattgtgagatagttacgtagacaatcctctgtcctatatttgatctcgcttaaaggggagccaaactctttggaatataaaaggatgttttgttatatagtcctgtgttttcaggaataaaagcccctgtaaggatccagaggctacaagtcacaaggccacacccacctgctgctggcagatggtctgaggggtgctcctatattgtcttagggaactctggtccttgtgcctggagtttgcaccccatctctttatatatcccctcttctcacttcttgtttcctcttccccttctctgtttcttcctctgtccttacagtgtgattcaaagcaggatttgtggttggtgattcgcatgcatagtttctgttctttaaaataaaactcaagtccccaggagtaggggtcatgaagccttagaagtgaagctgtcccaagtcattgaaacatcaacgtagttagaagcaattaataaagaatataactgtttttcaaaaaggtattcattatttgtaggatattataccttatatataaaattgtgctctagtataatgttcatttcactggattattagcctggccttttgtgcttatgtgcacctttgagtcagggccgatttaaactatctactccttgttttctgtatgggacacagagacttgtactagggataacacagagaattagtatctgggacccatggagtggtgatagagtccagttcagccctgccatgtccacatagccatagagcattggcaatttagtttgttttcaattgaagtctgccttccttttggctgttatttgtggatagaaattatgccccctgagaactgtgaagtcttcagtgagctaatgtgtgtgcagcatgaaagccatactcagcacgttctgtgattgtaaatatatgtagtaagtatctgtcccaaatcaagttgttgataaattggaaacctgtgttgtagcacacatctttgtatttagagatcaaatgcatgactctaaatccttggcatttcctcatttagatttatctagcacttgcacaccctaaatgtttctgtgatcagatctgtcatattaatcagctggttattgcataaaatgtacagctgtcaaagataggcacaaaagcaaatcacaagaatatctcatctgtgttttttctatcaaaatgatgctgtattatatatgttttagatagatagatagatagatagatactgtagtatatatagtgtatatagtatatcaatatactgttcttccaattctaaggcatcactttttttgatagttaaatttatatttgactacagcatactacaacctgtctgcattgctagtcctattctgaattcacttacatgttcagtagtatatacttgacttttatgtaataactagacagttacttttaagattcttcagttgtatttatgtctttggtttttatttgttattttgtttgcttgtttgtttgtttgctatggaaaataatttctttaaatctttcccatgatttttttataacaattcaaataatatcaggaaattcttcttgacatgctatgttaagccattactaagagttataatacatgtacaacagagtgaacactcttagcatctacctttctaattgtaaaatgtttatgctacttgtttaacatgtaatgaataatttcaaattaggttgaaaacaatggaaattaagtataaaagcttgtgatataaagtgatgctgacattctggatagcatttgatcattctgtggaagaatatagaacagtaacaatgggaactgaagcagcagttactatagttagctctctgttgccagagcatctattcctacagggtttcagctaggcagtgaacatttatactgagcaattacttattgtagcatgtgtcttgcaatagatgtttcctatgcagacacagcaacttttctgagtagttccaaacttaaagccattttagcttttttcaaattgttgttttgattttagtttatattttttggcaaggtgttgtttgttttcctgaaagcttttcaaattgcttagaattaccattattaaatttattagaacatggattttctaaatggcatttacatttaataattactgcaactaggcactgaagaatattgactctggttggggaaccctccagataatcattgatgagcaagtgtaagcccctaagaaggggctgggagagatttggtgctttgcctctttgctcctcacccagggcactgggaacttgaataagtaagatttaaatacctttatggattatatcaagtcttttttctgggtgttaccgtgttttcacatgatatgttctagttcaagtttcacacgtttttctgttttaaatctcctcttagttatttttattcatgtgtatggaacattgtgtaagtctcaacttactatttttcccctgtaaaatactggtatgccttaatttatcattatgtagaaatactggataaatcaactatttgagtgcacattcccaagtaaattttgtatatgtgtttggctcggcttctaatagcaagttcttagactttaattttagaggctatactgtagtcaaaattgagggttgcttgcatcacgttaacttcgcttgtttttgaaaaattctaatggcaatgtatgtatctgttccaaaaactagagtctttgaagcccatttgtattatataaaggggaagtctgaattccagctacatcccaatttgtttgtaaaaagcttgggttgagagcagaccatgtgtctttggagcattgctgttacctgggaaggagcaggtcagggacctctctgtttcatggggatccgtgcacttaaggtggggattgtaaagcccagggtttcttttcacaaggtggatgaaaacttttgttatttcttgtcaagaggttgttgaatcagtctctgttcttctgacatcctaatctgcttcagtgcaggaagcagggtttctagggacttccgtggtatgtttgttaattgaccactttaagtaacgaagtagttagtgtaacttagccctaccttactttctacaaggaaagtatatttaggcatgtttagtgagcagaagtgatgataaccaagtcagcaagcctgtgcaccaagtccttcatctttcaccctacttggcaatcagggcctccttccattttctctctctgatatcagacaaatggtgggagaggaaaggaagctagctttccactcatctgatccattgctaaattaaatatgttcaagaagttataaaaccaaaggaaactttttctttgccaaaatcctaataaactatacaaaaacatatattgtacatccagtagttgttgcttgtttgatgtcaggtcatgtagcatcaaaggggacaaaagctagagaaagcacattgtgctgggtagaataatgagagataaaatggagctagggtttctctgcctctagatcttcaagtaatctgaagtatggaaaagaaaaggaaatgttaaaaatctaacacggatgaggctcgttttaactttacggcgcttcccatgtgttacacgttgtcttccatggcaggaagctcacaggccgcgtctgttctgatatttctccttgctgcatcagtgctcgagcaagggctagtcttcccctggtgtttccttatctcttaaagtcagctttccttatctttgagcattgtgttcagttccattttattgctggtttgtgcgttctggacaaggaaacaggactttccctcaaggatcattccatacttacaaggtgtcctcacaactctaagttgcctcattctagaggactgcttctcagttacatggcaaggacgcactgactcacagcctagagctgcttggtggctgccctggacaaaagaagcaaaggttcctagaaggtagccctagccttcggatttggcaccagtgtctgcactgttccccatagctcctcagttacccatgcagattcttgtctctgctcttgatatcagtgagccctgattaccaacagattgtaaaagggggtagaatttagtaccaaccgatacctgggattcttcaaagtacaccaagtcccttgtgaagacacagctgtggttaaaaggtgctaagggtctgccaaattatctaatgccacatgtcttatgtcttaggagtgacaccatatgtaaacgcttgcttcagaactgttagtaagtcctgtgcagagccagatattattctgaaaatagaagaaatctgtaaagtttgcccacagagaagtactgtttcatgagtaggggatacattgtattgcactagctgagctcctctgaaggatccattgttaccagatcaacagaggtttctcatctctctggaagagctgctgccttggaacaaacagccaagcaacgcctccaagcttgtttataccaagcttgtttacagtcctcctaaagacagctctttggtgcacgttgctgtacagagaattgcatgtgttctgggatacaggtatatcatgaagagtttgaagccttatacttataaagctgttgacaatttccagttgttttttgaggtggtgtgtaatagtgtggtctgaattccacatgcatgagttaaattaagcaagttagcgtgtccatcctctcagtgttgttcactacccagtgactatgcaccatgtctctgtctagcatttttgtcatggtctgtgctagtaaaatagtaataaaaaagacagagtagtccaccatatcccatcctggggatgtccatggtcatctggcctgttctatgttgtttaatgccttgagtcatcagtcaggaacatagagtgatacactcaaaatatttttaacatgtggtatttagaatgtttagaatgtcaaagaatactctgtagtgatctttccctggaggcagggtggttctaaaggactactctctggacacttttataaagtgctttggaagaaaagagctcaatttcatgggaaaatatcataccacacactgcagtggtatattagtcgattaacctccaagaaatgcaaggaacagtacattgctcatttttttggttgttttcctatgaataagagaatgtgtttgatgctccctcagggagctacacctttttctgtgatcgtgtttttttttttttttttcacgttttatgtccaagtgtaaatgatggaagagatagcataacctgttcatatttgtcttagaatatattaaattcagtttctatggcaacgttttttaattggcaaattctattctgctagtactctccagcctatttttcttgggtatatggaattgtcagaaatgcttcacatagtaaaagttagacttaactgtgctctttgacaggaaacatgttcatgggccagggttgatttcatttgttaattttctgtactgtgttttcgtggttggttgctgtggcaattatgtgtctttctcgacacccttcctgtgtcaagaagccagtgaggattggtatttttgtctgagcttacaagtaggtgacagcctttcttaactgaaaaggaagaaaggaaggaaggagggaaggaaggacaaaagagagaaagaaggaaggaaggagagagagagagagaaagggagagagagaaagaaagcaagcaagcaagcaagaaagaaagaaagaaaacagtgtttgaaaatcccccaaatccatttaagcagggttctgggtgattcttgactgtaacagaataagctagactgatatatcagaaacacagttttctttgctcatcgtacacatactgtctcttgaatcagtgtggtgcacaatgttgaagcaggtactgggtaagttggatttggctactgcagtgttataaaaatagattaggtaaacagacacagcaggcccatgcggcttgggttctgactcctccccagacttagtataactttaataggctgtagttctaaagagaactatgaatctctagggtgatttcaatattatataacgaaggaggagctgttttatagcaaggaatcaggtgttatgtcttgtaaaataatttcagagaggtttatctgaaagcttcagtttttaagctattccaggcgacggtggacgtctttattttttgcctttgctatttttagagccctgcagtagcataaccctgcaccgcacacaaagcagtacggcagttggtgttggatgcagaattgctattagatgaaagctaacaaagcaaatccttggaaagaaggagcctgtctgcggtaaagactttcagtatgaaagttgtaatgtaaaaattagaatgctcaaggataaaataactacttccctctaagaagccatgcctgtttagtagagagtaattgtagccactcactttagctactctgcaccactgcagatgttctgaaaaggtgttcctttctgaattggtccatggcatttttggatttttttttcccttttatcagaagtcgtaggaaacttttatagctgagtatttcaatcaggtttcattttactcttctaatccacatgctttctgaataattatagcaccagtatgtgtataaatattcatattttataggttgataggacttatgcattatctccagtagtctaagaaaaataaaatgtgttatcaactaataaactgttgaatcatctgaaaagcccattgtacagaggaattcagaaagtagtggagatgaggtgggctataacatctgtggagtgaagtgtgctcagagccacaagctttgagcatcattctgtggtcagtagaattcttttagattatttataaatctatactttagctgtctggttttaaatatttaaaagaataccaaagattcatgacataattaaccgtgttgctgcttaagaggaaaattaaagctctctgagttggccttgcacacctccttgtctgtctgcctcagtgtgtctttgtttgttcaggtagacagcaaccctgatgaagtggaggggatttgtccatttaggaatgtttagagatctgggggatacactacaccgaattatcaaggttcttttcataaccagactatacaaacagcacttgagaaattagtgcagaaaggtttgtagcatcattctgtcatcagtagaattctgatctttggatttttaaccctcaccaaccctgtctaatagctcagagcagcaacatagccagcctccttctgtattctccagcagttcccgtgctgagagcagatctctcgttttgggaattgtcagatttcctgctgttacatctttatccaagccagtctgactttgagcattactgcttgcaagtactgttagggagaggaggaaaatcaatgtctccaaaatgggcagggttatagctccagacgcagcaggctagacagctgtacatctggaccctttactgatggtttcgtcaggtacacatgaagtacatctgctgacctacagttctgtgacagataaattagctgaattattaaagagctttcttaatcaccaaacatgttctaattgaatgatgaaggatgaaggtgagcaggcaatgagtttcaaagggtctagaaacaggtgtgtggtataaaatgtaatggtatactttttcttgttgctagcctaatttagttgcatttgttttcccatattgataggaaatgtatttttcatatttttagatcttgaatggcgctcagtctctacacacaccctattatgccatgagacactgatgccattcctctgtacacacaagccctggtgcacatatgcacatgcatataagctcacctgtaacatttaggtatttagggtgaaatcaagtgtttggaaatgaaatgctgtttctctttttatattagggaaacatagccaaccatcagtaacaatcttatcagattggactcctttgtgaaagagttttaggacaggaccaaaatatccttgtctagacctcttcagagtagaatagaaaaccgtactttgtataaagttccggttgaggcagaacagcctgaaggtttccagactgagactgaaagcatccaacaaatgcagataaacctgcctaccataaacactgccacatctcctggcattctcccactgctgcatgctgaaccaagggctgcccacaaaatttcactgaaatgtacccttgttgccttagtagatagataatatagttattaccattttgttcatgaggacactgaggggcaaaggactaagtaataagtacaacagagtcacaggtaggaaagtgcaggattagtttttaaatttatgttcctatttttgcttctttgaaccccactattagaatttatccccatatcagttttaaggaatcaaaatgaagaagagcggtccgtgtttaaaaaataatgtcttcatggaagtgtgtgctgggttactgtttcagatttgttcagtattcaaagctactgttgaattcctgcctttctcctacatttccatttcttttttccaacttctcataccaatgagcattcctccctttgaccttgtcatttgcattagaacacttgcttctttggaccttagactatcatcaagggatcataacttttcatctagctccagaagtctaggagagctgaccaccttgaaggactcacttattcgctgcctttagctcttgtcgatattgttttgcttttatagcatactgttaagcatgggccaggcatgagcaccatgacagtctccaagaaaacacccttacacacttcagggcgttacagagtatatgtgagagccagaaaagcaaattgaccaatgaggtgttggcatcgtaattggaagcaatgagaaatagcacacagttgcacgaggcgagctgaatgtctgtcccttcccacccccacctcataggctcatagtagagcacattttgaaaattctgaggaattcattccaattctattttggtaggcaaggaaaatttagaaaattggtaataaagtattgccagtctctactgtcatctcaatgaatcacaaactttagcttcttttactgagcatggatacaaacacagaatcattgagtcccataattttgttttttaaaagtgtatctgttcgtaatggagagaattgaaatttatacgtggcaggggtagcaaagtcatttctctttatagtatcaggttttaggaagctccattctcccaaaatatggcgctcattctctctaccaaaggagccatttcctgtcaatgtcaagggacaaatggccaatgggtgttgactgttgaccaaccaaaaccagtgctggcctttaggctctttcagtatagcagcacaactattcatggctcttttcagcgcttctgatcctacctcctgctttaaactccaactcctgggcttccctctttcagcttccctctctccctctctgttcctcttgtggtctggactctttcagatgcctttggctgtgtccttcttcgtatctacaattaaagtctttccatcaacaacacttcggagtagtcaagtctttagtttataaatctagtgcctaaaccctcagtttatacatctggtcctgaaagctctgggtgggagcacaaatggatccctccctttcaaggggtcttgcctttcctaagcaaacgaagctgcagacttgactctcctaagatacgcatgtatctgttttgtttttatttatttaattctagagtcttcctcttccttgcttcttcctttcaccttctgtacttctgctgtggtattcggggcagctctctggctcctggagcctgcttccccctcctgggtgcccttcacaaataaaggctctctctccctccacctcctcagtcctcttctattgagtaaatttaactgcagcactatctgctttgtctctgttgacttgctggagcttactattactataaaaccattcttctcagcctcctgggcccctgtcatatagaaaatggatgcctctcctctgtgactggagatatctctctctctgacaaatctctcagtgcatttgagcatgccccagattgaagctcttgttgcacagaacacttatcctctccctcacgcctttctccttcactgcatgttctcggctccctccgagcttcctcctctctgctagaagctgcctgcgtggtctctctccatagcttgctagaacccgttgtttcttcctttaccttccctgacctctgtgatacagacatcctctggggtggagttcctgtttgcagccctgtccctcctgtctgtcagcttcctcctaattagaaccctccctctggtggagttcctgatttttcctttttctcttttcctctttggagccagagactgtatgaagccatgatgtctggctgaaaaaggtgaccttagtttagtgcagtagcgccaaatcaatttgcaaattcccacatattgtaaaacatttgccatcatacaagcaaatattcgacaaaagtctcttatctctaagctttttctactttccactctagaaaatcttttatctctatgctttttgctctttgctctcaaaaattattttaaaactattatataaactctgtaaaatttggaacaaaagttagcttaaaatttgcaaccaaaagctaatacgttaaaaaaaaaaacaaaaaacaaaaaacaagactatacctaggtaatcttaattttctctgtgatactatatgtgtagctcggattcaacatgtttagggaaaacacacacacacatacatatgtatgtatatgtgtgtgtatatatatgtatgcatattgaatatatgaatatgtatgtatatatattcaactcttgttaagtaaaatagatgtttctaaatagtagccaccatgtgactgcaccaccatcttctttaagatgaccacgtgctataaaccagctaaggcagcacccataaaacattttagacctcttgaaccccaagattgtctttgtgtctccttttcacacaaaggaaacagctgcaggtcttaaagacattttggattaggatgactctttatatgataatggaaagagttaaaatttatacatggcagtaatagcaaaatgactgttcttcactttactcgagacattagaaacagtaactctaggctaaggaccttaaggtgagccttaaacaatgctctgctttaggagagaaagagagaaaaagggggtctggagagaaagagttgggggctatgtgacttattttatgaaataaaatttcacgcatctttctaagataaaaaatttagaatgcaattgaaaaattagagtaatattaaagggatagaaagtttaaccatatgagcccttgtacatatttacactttatttcaagtgctgtttgaaaactctaaagaggggtggggatgaatggaaatcttctgaaattcagcatacttctcctacctctgcccatgaataaacaactgtcctagaatttgtatctttgcaaccacaaaagggcagaacacctaatgttagtcattagtttttgagtaataaacgtctgatttaacttttcttaaccactttctattttagtatgccctggcaaattacgtaagagccataattgggtgagctctaatgtctgggcaaggaactcacttgagaagaagagagatctgttacaaaagcagcagctcgggacatctcagtgtcctgccagcactatggtatccctatgaaaaacagctgctccagcttggtacagtaatgtaagaaaagcttctagaagatgcaaacatattcctcagggtccacacttctgtcagggacttttttatgtcatatttaagaagagagtggctacagttttcttttttaatagggtattacaaatgattttgaagttttgatttgtgcaggtgcaggcctgtcggactattcaccaaagagtagtcctggtaatttcttatattaataattagaggggttttttcctgctgtttattgtgtcaggatggctttgtgtgttcccttggcctgcttcacttgatcagtttaagcagctgttttgccttaggtcattaggtagtaaataaccacacaaactgctattaactcttggatttgtttaatgagtgcagtctttttatacccttaggccatcttgcctggcctaggttcctgacatctgaacaggcagctacaaagacaccaagcacaggagtaatctttgcttatattcaggtcccttcctgacactttagttcagcctgcaatactccatcttaactctctgacctggctactctgcacaaagccttctccctagcctgatggttttattcttaagtcagctgactcctctgaaagctctacacagtgttcttaagtctattttactgtgaaggcctcctggctctttggattttgggaaagtcagtgtgttaaaagaaaatatagttgcagaatgagtaccagacagatttgaaaactaaatgttttcattctttctgatcttgggcaggttatttactgtcggtttgacttttttgttgctgtgtgttttgtttttgtttatgcaatcatgcatttaatcctgggtgagttttggttctaattttctattttatgaaataatattggactccacctgtgtcatcttgaccccatccctctcttgccctcttcctttcttctttccacttccatttttctttctttcattcctccatccttttgtgttccattccccccactgcctaccttttgtgtattagatgttcattagatatgagaaaataacaaatttctcagaaagtttgaaaaatatatattgtattgatgcatgtgttcatttaagtttgcaaagtagctcaagaaagcagggtagggggaaatggtctttatgcatcaaaaacgactttagttaaagatcccgtggaaatatacatatatatgattcacttttagtttatttattgagtaattttcttgcatagacatgtgcatcacagccctagggagcaagagtcagacagcctgtagctgcagttgtggatgtggggagctgaacccaggtcttctacaagaggaaaaattgctcttaatccctgagccattccacccctcccccaacccttccaaaagatcagttttttaaaaggtcatggaatggaacatgttttaagtgtaatattgaaatcgtaacactagaagtagtatggtgagctgtcaggctaatacaacagtgataatagctaggtgttcttttgaaacccaagatatggcagtattatgtaagtaaatacacgtctaaattgaacatttcactacagtttttgtttgtttgtttcattttcgagacagggtttctttgtgtagccttgactgtcctggaactctgtatatcaggctggcctcacttacagaaattagattgcctctgcttttataatattgggattcaatgcataagaaaccattgtccagcccttaaaaaaatctttaagaaaaagtgggataagtaaattgtattttgccattttttgatacctctttcttaatgattgagtagagttgttttaaagatgaatgttaaagctataatgatttctatacttttatttaaaatttaaggcataaatgtgtgaacataaataaacaggttcaatggtgatatataaccaggcatcggatatagctggacgaactcttaacaaagacttaaaaacatcttggaggagatgatatttaaccaagtctttaactttactgaagatttagccaaggagtggcagggggaatggatgcagagcagattatgtctgggtatacatgtatgcagagatatcttgtgcaaacatggtttaatgtggcctgtagacagtgtgtgtgtgtgcatgtgctagccttccaatcagatatgcatccacttttctaaataatgttatagatttaatgtattcgtaataattttaagagatacaaatatatagtatagaaatatatctgttcattttctgtctcccaaatagcaaaagcaagttttacctgaaaaataatcagtaaacacaaactaaaaattcttttaatccctcaaataggccacctgaatccattggtgggatatatgattagaggcagcacctctaatgttataacgtacattgtcatgggcttgtgggacatttaacggttggaacctcatttcttcagttgcaatataagattaatcagaagtatctcacagaattgtcatgaagataacagtaggtcttatgagaataaggagacaccgtactttcaaatggaatgtagacactgtactttcagatgtacttattaaatgaaagttacaagggcattttattcatttgttttccaaggaatgttgcattgatcttaagacttcatttctgtttccttgaaaatttatgtcaatgtacttttatgaacatttattgaaactaagaaaaattttagctaaacttccataagatgtaattgagctgaaaaaaaaaatcagtattagctagcagttaacataagaattaccagagatgtgaatgactacctaagttgtgtaggatttattattaatataatttgtcatctgtatcatgactatgccttctgaggacattttgaccaacagaatccttaaactcaggtgcatccagtggtaacatagccacttccataaatttcttttagatttttttacttcctaagaacaaagtgttctgaaataatttctcatcatatagctgttcctgatatttgtatgggatcttatgtctaaaggagatacaggcagcagatctgtcttgaaacccattgtgaaaaactctcttatttctcccattcagaaaatctaataaacaccttcaaaacaaaaaatggcagttacttgaaagattgtaatgattcttcaagaccctggcagaagttagtcttaaaagaactctgcaggatatattcagcgcaagccaatgacagacttcacaagtatctgaaacacagtcaagagcttgataaatcagaatttctgggagcagaggataggtgttgctgtaattttacagtttttacttaaagggccatgagagggaaccattaggttggatcttgattatatattacctagagtaggcaaaatgtctctgaactcatatttgttctacaaacattcgtgaagatgtgcatgtcaatgagactgttaatcctatagtcattgaaaggtttatgcacatattggtgtgaattacttctcatctaagttaaaagctactgaagttaatactatctgtttattctacctgaccaaaaacaagaaattgaaaagaatccacaaaagagggctattgaagataaccacttgtcattaaatttaaaaaaaaatgtggaaacaatttgttttgttgtcagcccacttttcaaaacttgtgcccagattcttaatataaaagaagtatgcttgagtttttcctcttttggggcactaagcgctgtctcacagtgccccctacctggatgcagtttcccaggcagaggcaccatttgctcaagaggctaaatgcctcagtgaagtattgctaaggagtgtcaagtcagccttgcagtgaacagtgttcaccttggctctggggaatatccttcctactggagtctggagttggcatctgaagtcactagggacatagtacgcgttggctcattaaaagagactctaactctgtgtaagatctgaaggaagaggagagaaagatgctttaagtaaagatattttagaaagacttgggtgacagaaagcaaggcttgcaaggttccagtgatgggataaatatgctaggactggggtctagtcacttatgttcattgtcctgacaactgcatgtgtcgtttctcttacattcacattttagtgtattataacgtggtgctgcatgtctgtgctcttgcgaggacccacggctccattctaatgacttagaacacgctccttccagttgccttttagaacatagcactttgggaagactttgcttttgtggcgatcttaggctcacaaactcatctatactggtttttttaattttttgtggtttgtacttaactgttaatatccccactcacccaaaatatgaaatgtgtctactgctctattccttgagataaacgtcagatgctatttgttaggtgttgcttctttagatatttgagggactcctctgggaagcccacaggagacctgggggtgaggaaggcacacagagcaggaaacaggctcacataacttgtgttgtgatactcttttttttcaagatcttttctaccctaattgcttatgctgctgcagccagcacccaatggagctgtgttctgggttcatgaaataattttctctctcttcattgctgtctcaagtcagaactgatagctgtgcacagttttagttgattgtcatggggatgggaggaggagtgtattttcctcataggaacagaaccagtgtcagtaagcacattttgttcagctacacagttggtctgtcaggaagaaacactggtgaagtagccctgaacactgtcacctcacctttccttctgtctctgtcaatgtcatctgcacaaagcagtagcatttcatgctgtccttgaatggcatttaggagcacagaaagggtcagtgcattttcagttagggaatcccataggcttgcaaagattgccactggaatattgggagcgaaagaatctcatatttggcaaagctaatgaggcgtgtaaagccgggagaggagagtgtgaggtgactgtagtaaataaaagcagttaaaactgcccgcttagtgtaagaaattgtgtacgcaccagttctatgcgttagatatgttatcgcagctgatagattttgaagatttaaggtaaaaatattaacatttggtgaaagtgtaacatagatactttgaaaattgttatgactaaattatgagtcataatgagttatcactttagtatgtgaaaattttactttaatttttttaagtcaagatttgctttgttatatttgtaggcatattaggatcaagcaggaataaatacagtgtcttggttgtatcaatacaagcagattctgatttctttattagtttcttttatatccatgaatgaaaaggcgtgactcctaaaatttaccatggtttgtttttccctagatgctctactatatgtgtatgtacatatacatgtataacatttatgtaatttctgatggatgcaaatcgaacaggcctatgaaatacatggataatttgcccactcacctcttgccactcaaggtctcatgctgaaatagagtgcagaccattactttaactcatttggtggtcctcacccccttgcagtctgctgtaggtgcaaacatgaaggaccaaacatgagagattcactgaacttttaaaagcacatttaagatttttattatagtttggaatactatatggactaactttcaaaactagttgcttacatcttggactttttttcccccctttggcagaactcaccatagttgaatccttcatttagttaggacctgttcttgctggtcccatttgtagttttattttgagaggtcagtggttaggtacttatacttaaagataaacaagtctaatgcaattggtatgaatgtgtatcctaatacaatgtctaggagctccagctcactgagtagacaggggttcagtgatgtatttatgaacagtcaaaatacaccttctgtggttccccaaagtaacagaaaggtagaataactgatgctggagcattaagttgtcatgtcaacatccataatgtgcttagcatagcacttaacacagaagcctcatgcaagcttagtaagtattaataattaataataaatattcctttatcataacaagatgcatcttttggttttagatcagtgctgtcgggaggggaggatacaagctggaggtttcctgaataagtggaccaggagctagcatgtgtatgcaaacgctgccttagtaattttaagagccagataggagaagcatgcctatgttttacctaaggttacctcctgacttcttccatgttatcatccacattgtaatgtcacagtgatgaaaaacatgccctacaaagacaccaccaaagattattatgtaaacactgggccttttgattattagctggtttgatttgcaatccctaaaacatcataaatggcttggccatcgtctatgtgctgaaaaatataattggagcaatttgaatacacacacacacacatatgtacatatatatatatatatatatgtatatatatatatatatgtatatataatgatctggcatttccagttttatgatgccataaaaaagcagccagcacatgttggactgtttaatggtcctggcacctaccaaatgtcactggactttacaaggtcatagaaactccactttggttcaggggtatagactggatccatctctgtagcccacacagtatatggaaccaggaatgttgatggtgctggtgaagcctccacagcactagtgtctatatattgctaggattctgtggcatagagaccacacgtttatgagaaaagcaagactgtttctttgtgtgccatcctgtcagaggcagctctaaatagatctggatttctggtgatgacggtgcagatgcaacctgctgtcacagctgcatgtgtatgtgatctctcataagcaaaagctgctggggggagacatgatatttttgtcacaagaatgtctgtgatttgctgccgtttcacttcctcccccctccccccccaaggtgccaacccaaagcttgtgcactcagaacaccaagcagaggtatagagtttcactttggtcatttccaagatgattaatggagttgtgcaatgcaggctcctgagcactctgggaaagtcacagtatcccagtgaggtggagtgccttgatactgcgtcagcagggagggtattttgggatattgtaaatgtcactattggttttaatatacaagaatcttcatcatcaaaccttaggaatgttctacaaaacactgcctagaacagctattgagttctataaatgactctttaagtagctagaaactgttacctaaaatctcccatttgtgacccagttagatatggatgaagacagtttagggcttattatatggagccagtattccttcaagtaatgataaattataaagttaactggctgtgagtgtgtgtgtgtgtgtgtgtaataagaacttgtcatgggaccagaaaagaggaaagcctgaattcccagtccattctgtttcagttgaatacatattttgtatctatggtaaactaactgtaagaagttgagatataatttatctatcactcttttctagtaaatatcttaacattcagactgtttacagaactgtgcaagaaaaataagtaaatattgaaactcattcattcatgctttcaaggtttttaaagtgtgcagctcttagtaattgacttaattagcagggataactggtcagctgcatgctccttttacttcatgttgctcagtataaacttaatactttatgtttgaggacatttccagaataaccctttccattgaaaatggtaacatttttagaatgcatagagctctctttagaatatcagctattgtacatgtagaataaatggaccaaagtcttaatctcatggtagatttgtaaatgaggtttttaagactagaactaagattaaccacggcagaagactagaatcataatctaatagaatcagtgcactgacaagaagaattacaagtgaggttagagtggtagtgtctctgtctacatcccccatttccccccttcctcctttccttcctgccctctctccttcctgtttctgtgaacactaagggagttgttgatatggaagcaaagacaaaggaacccatgaggagagttctgactgaaaactgggtaggataggaccttcatcttggtttttgagcttctaaagctgagaaaattaatttctgtttaaatgacccagtctgtgacatttttcttatggcatccctaactgactaataaagcctccattatatttcactgggtgggtataagtcagtgtttgtctttcaactggtaattatcttaatgatgtccactgctgtacccagctgggcatgatagtctggtacagtctaaacatcctgtagtactccaacccacacaacaacatttatatgtggccctaattgtccataatgccgatgttaagaaagctagcatgtcttttcagggtgcaggtcctcttgcaaacttgcaaaagccctccatgggtgcaagcaagctataaggaacactagcgtaggagcttctgcacagtctgttttagttgcattgacttttttctctgcacttgcaaaatcacataaaatgattgttagtgttaattgaatgcatagttgtctttaaaaatcaaattgaaggatttagatatgggagttggaaggtctggacaaaatacacttttcttacagtgaattagaaagactgttatcgatctcctagcattagatgattaactagacaacaaggtggattcataagaaaacatttcgtggaagtgagaagccacatgtcttggtgaccactgacattaataatcttattttgggaaaatatatatcatcttgggaaaaaaaagctgttaagaagtctcaataagaagctattggtttcacagtcagattttcaggccaagaaagtacttcaaaaacacgcttgtctctgctgtcccaaaggaaactctggtttcattttaaccactgaaataaatggttccagtttgagagccttgctagaaatctagtgttgtgaaaggcagctggaacagcctctgaggtggcacccctagaatttgttcattgcctccgtattctagagcctacccaggtctgactgggcaactttatccttccggttggtaccatttggcagcatgacagtatgtccttttggattctgactatacaaatcatgataacccttttatttcaggtttaaaaaaacattgaaaatttaattttgacatttttatatttttaaatttacttgccttctttctattgtactcttttattttcaattattagtaggtttttaaaatagatattaaaataaagaattgatgttaaatttagtttataatctatgttcctaagcactagaatgaagacagagcacaatactttgaatgtgttataaggaacttatccactctctgtgcttcctgggtaggggttagggcatctggtgggtgatgcctggaagatgaacagggatgacactgactatggctttaccataattctcaaaggaactaatgctactggttggagggttttagttgttttgtgttcctagatttttaagtaacgctctaggttgggatatttattctgatttactcttaatctttctgtttgtagagccacaaccattcacaagtgcagtcaacacctaacctgtgctgactttaaaaagcggagtttatgaaattgcccttgaatgggttactgtaacttttcctatgtgtagcagtgcaaattcctgtggcttcacacaaaatgtcttctatggtgttttctgctatgccagaactaactccttgttaaaacccacatccctggccctaacttgtgtgcacagacactaggaaataatcctcactcaccctcctataagaaacaccagtaaatgcattgatttggcaacttcaactctggtggaattgctgctttagtctgtctgcccttgtttgttcaagtgtccccaggaaaagtcacaggatgtgtaggaatgtcctgttcagaacatattcacattattttttgaaatagagaatctataacaataaaactaagcaacagagaaatatagtcaagtgatactttagccactgagtaaatgcacaatagaaaccatatgtctaagcttctaaatttcaagatggatgggccagcaaaatggctctgcaggtaaaagtgcttgctgtcaagtctgacagcctgatttccatccccaaaacccccatgacggaaggagagaactgaccccccccccccacacacacacaggttgttctttggcctccattagagtgctgtggcatgtaataaataaatgttaaaaatacaaaaagtttgatgggatgccctgatgcagaatttataggcagcacctaaaatccctttctgttatttcagaccaagctgggttgataggtagagggtctgggtgctgtgtggtcaggaaggtttcctcagagggacactgaggaaagcgatggccagtgtttgtctagtcccaggctaggtctgtgctgtttgtagagctaaagcacctgaactgactctgactgaaccatcggctctacgcacccttctcatctacacctcaagccagttttgtgaaaagtttgaggaggaagtatagagaagtggaaattgcattggaactgtggttggttctcatccttcctcaagctgcatccctttaagactctggtttctcatgttgaggggacccccaaccatagcttcataactataagttggctactgttaggaatcataatgtaaacacgtgttttccagtggtcttaggtgacccccaaagggatcatgacctcacagactgagagcaattgtgctgcagccaagttcttctttatattgaaataggtattatgtctctgggagaactcggcctgggagttctgagaactgtagcacttaggagcttaattattttgtccaatcatataacttcaaattgatttgtgtgtggcttattatatggggctaagttgtttttgaggttgtttttcaccgagatgcttttatgctaacaatgtttctgtgagcacagcatatatcaagcatggttatttgacttggaataagccattttatgaagcatgggtctatctgtgaacctatcaaaagttgtacctagcagataaattagaaatctcatcctgtcagtgtggaattctacttccctttgatatgcatttaagctgtgttccagggatgtgcttatagtgttagtgtcttatgcagtttgtagggggagggtgtttataaccttcgtgtcttatgcagtttgcagagctgatggctctataaactgggggatttaggcatcaggactgtacagccagaggcatctggaagagtccagagcagggagagaaagtagtaggagggtgaacatggccagcagactagagttgtcagtgaggtgagtcaggagccagagaggagggcaaacagggtgtggacaaaggaggccaagagaggaaaacaagagagagacaaaagactgagagcaaagagggtgcatggccaagatggcagggttatgtggggaaagaagttggcggggtgggatggggagggaaagttttaggatggggactggagtcggaaaagctttgaaaagacacagacaggtacttgtgctactgagaaagcctagaggccagcgcttgttttagtgtgctaataggcaccaaagatccatgtatgccttctgacagcagtaaggaatggctcctttggcagagggatacgggccagaatttggagagtggcgtttctgttggacctacgaatgagaaaagaagctgtagactgttcacagtcctaaacttgcaggcagtgtccttattaacacagtatagaaacctgtcctaaaacagcttaaagttagagaccctaaatagagcatttggcttagaagagttacagtttttattgtaaacatcaattttctaacttattcaaagtaaaattcaacagaatttacttttctatagaaaaaaattaaaaaggttatgtgtcgcttaatctgtataagcagatctgcttagattctctggtgtaaatgtgtagttgttgagattgactaacagtgtgtcagtcagtatgaatggagtcgttcccagggtctggcatattacagactttaataagcgcttctgatccaggatagacagatacttatatacaccgtttagttatgctgctttaggggttgatgtttctgactttctcattgtcagttctttgccggatgagcataccaagtctgactattttcacagtttggggtcatgggacaatattggaaaggctgaaggctcatgtctaaccagtatttgactactatcctttaaacctctacttctgtgagaaccaactagctctcttttcagccaggggatttccagtatgtggggctttgtagaagttctcctttgatttgctttggggctcctttggagccattttcctgggggaacaatgttctgtgagtcccctaagctagtttgttcaaactcagtagagataaaacaccaatgacaagtgttttcatgaatttcgcttctcgtgacttggtgatgttaatgaagatgctgtagcaagcattcaaggttctgtacttgacatctgtgtgtgaggcttacttttaaagcagtaaccttttaaactggaaacagtaaccctgacattgttagattacagaaacttcactgagcctttaaactttttcaaatatcttaaatcttcattttaataatatatttgtagttgaattcatgacttcttcttaatgtgtaaaaatgctgtgagtgataaattgtgagaaaaactcatagatttagataacttgtttgcatatcatttctataatttagtgattttattttgtttaacaacggttcttgcttcttttatcttttagggtcgttgctccagagagaactgcaaatatcttcatccacccccacacttaaaaacacagttagagataaatgggcggaataacttgattcagcagaagaacatggccatgctggcccagcaaatgcagttagccaatgccatgatgcccggtgccccgttgcagcccgtggtgagcacactttccaccccatccctgtctgtgtggccgtgttctgtgtctgtcctgaaacagtgattgtatgcaaatagaggcagcagtggtaattgctgagtgccacgccccgtgaggttacttaccttcacggcaaacttggcaatttatagtctagtattgcttctgctaaaattctcttaaaagttaaccgtttaacctgcgactgttcacctggtgtttattaaagtagccattaaactcagtttagttaaaatacattccaaatttcctttgaagttgataatgatatttttcttaaaaacaaaacaagaaagcagataaatgataaatagtagtctttagctttgaggctatttcttgctttcttctctccttgaagagaatccctgttattttttttctctctcaaaaaggagactttgtggaaaacttaacttgaaattacttcatagtcacaaatgctgggcactttttcacagtggcgagttataagcatagcttggaagtatcatcagaagagaactagtctaaacaccagaatcccaagggcctttgaaaaatagctatgagtggtcataggtactaatattttcctagccatgtgtgttggtaacttgtttatgaataaacatatgtatttaaatgtttagatttttgatgtgcatgtgataaattactttaataatcttatttatataatagttaatgtttggttaaaatggtgtttatgttaattattgttcaaaaaccctaaattacttacatatgtgataacatttatatgatcagaatatgtctgattgatttatcgctaacatattatgaactattataaggtcatgagaacacatgtttttccagtttgttaattgtagcatgtgtgctaactgatttttttcctaatacattttaacacctgaactcaatgtaattattattctctcttagaacataatgcaacaatcattccaaaaaagagggggggattgcatttcgaggtgggagggatccccatattacaccggcagtgataccaattatcaatactgtacagtcgaggtgagagaatattataattaattctctatcattttaatatgatttttattttatgacattattgggggctcagttaaaatgtgatattttgatttttatggcatctccttattttatgtgtctttatgatgataacataaatattttcatttggttaagaatgttttgtataatcataatttcttacagacaaatcggttctaaacatatctcttacacttggccctcatgtatggtttcaaagatctggaacagtttctactttagtcagcctccttgatgtgaggtcctttctcccacttaagcctgtaaatcacacttactgacattctgtgctttctgtgactcagagcacgtctgagtcaggcaagtgtagatctgggctggaggagcatagtccccaacacggccctgagaagttagttttctgtgaagtcttggcccattttttgaccttgtccttaaatctcctcgcatgggtgatccaaggtcatattatgcttagccctggaacaaactgtcaaagatcttttattctctttgaaattctagtgacatatgtgttttttgtagtcactaaatcatagatctctgaagccatccgtacttagactcctggtccttctgttaacatttttctgcatagacgaagtaattatctgttttagttatgagcacaggcgttaagttcatttctccttcacatcattacagttcaatgggaattaccctctacaaaggtactgtgaaaccacagttgaaaagtctccgttcaggatgatgtttttgtaataagtattaaaatcacttcaattattcaaacctgaagcattttttactgtgacgactgtagagaaggctttaatctaggaaatttgccttcaaaacccacccgagactctgatcctcttttgagtcagcctggtttccatgaggataacacagggatccagaagtaaatggaatgactgtgactagctgctttctgtgacttcaatttgagctgctagtagaaaatagagccacaagctgccctgtcactaacgttgagaaggactcggccatgggagagcatggacatagatcaggcaggagtagtgtgagtgtggctttcggtaagcagatccacaatatcagagcctaggaggacaaagatttcaatttagcaccaaacttcatacagaggacagaggtagcgaaatgagagcaaactaaatttatacacatccagtagtgtgtacctgcatatgggagaggttcataactgacagacagaaaaagaaggaaataaggagtttcccagacagccatcaacctgacagatattcatagtggtttctctgccctgaaggtgagaggaattataactcagagccagggcacaagccagaagtggcagcttcattgccactacagtgggctacagtgatcagcagttgtcagcagtgtttccaagacaagtgagatgattgttaagagcagccactgtcccaccagagcatggtatgggggtaacttggttaatgcagagattcataggagaactttgtgccttcagtaggttgtcatgcagtatacccattaaaaaggagtaacatttttgagacaagtataacagtttgaggcatctgttgtactcagcaggttctgtatatgccattctcacaactttgctgcgagctaggtaatataatgtccagtttagggattgagcccaagaggttcagagaggttaactacatggcttaggttacaccgcttgttttaatccagcctggccagatgttgagcttatatggtaaaaacatacggtgaacaggctaactactttggatctatggctgactctttgatcttcaacatggaaataaaatatgaaatatattgtccagaatgtctttgtaattatataaacataattcccatttcacaagattagtataaagggagttggatataagaaatggaacttctttgtgtgtctaattcatgaaagttcacacaataaactgtagaattttttatatcaactctttttggcattaggatttgtaataaaaatataagtgaatatttttatgttttttatcatatatgacctttgaggataagtgagattgtaatgattagtcttcagaattaaagaaaactttctgtgctctttcatacgttcatcatgacaatgagaaattgacatacactagctcaccctgacctgcatctgctggatgacaacctggaagcttctgtgtatttctttcatccccaggatgatgttccttagactctctgatcctccaagctctctgcatcacacatagatctgtgtggtcagtggggactgagaactcggtgtgagctcaggcgttccattagtgagccctaccaggctttacgtgggacctgggttagcagtgactctacagagttgctggagcagctactcctcaggtacacaccagcaccttgagacatgcaacctgtgtagaaatcccaggcacttcatgaatctgatgtgtgtgtatgagcagttcagaggccttagattcagttcaagtctcaagagtggctttgtcaccttgacgttggcagtctttcatattcccagggttctttggcagtaggtgaagaaggctttgaagttattatttgtccgactcccagactacctagaacttgccagtactttctgtgctttcttgtcttgttacccacctcatgacgttatggccagttcattctatagagtccccagaaaactatttctacatcagccacagtgacttgtcatctgttttgccatgcatcagtcagtctgacttttcaggtttgtgatcagtccctgaactgtaagaatagacctgtgctcatttatactgagaaggtcttaaatgagacttcactatttaaatgtttgtttcaataaaactgggtcaaaggatacagtgaatcagggtaaagaatgaattccttccccttcccattcacaagctatgagtagagtccacagcagccaaatgcttcattcttagacaaaattgaatatgggtttattcataatacctgttagctctgagtgctgttctaaacagtaattcactaaaactagttctgtatctgtttacaacatggtgcttgcctagaaacagttgcccatacttgggatgtcctacggatttaaaagagcttggcatttcactgtttacaagtttgactgaagcatacatgtatatacatatgcaaacattctactaagcatgcatgtgtacacgtgcacattctaccaagcacacacatgtgcacagtttactaagcatacatatgtacacatactactgaacatatatatacatgtgcacattctaagtgtatgtctctctctatatatgcacattctattaaatatacatgtgtacatatgtgcacattcaactaagcatacacatgtatacatgcacatattctgctgaacatacacatgtatacatactcacattctatgaagcatatatacgaacacatgcacacaccctaggaaaaactgacttataaaatttctgttccataaatttctaaatgataagttttggatcattatatatgacccttcttttttttataaaaacatactattttcagcattttaaaataaacagccttgtgatatttgcagtgttcagaataatagttataatacttaagatgtaatgttaatataaaaattagaaaaaataaactttgaaatattcattataaagtaacagctaaattctgaggtggaaaaaggatatataattaaatctaccatctagatatctgtgctagaaaatatataaagcatttgctactcttgctggcaaagaaaaatcagctagcaaatctgcagtgaatatgttatgcagtaactgcagaggtggttacagtgccatgtgccgggaagtaggagcagaggaaacaagaatggcttcagggtcagtgctacatgcaatgcgggtgagctttatgagacagagtgtagtggtgtggttccctgggaagcgtcgagaggttctgtttcctgaagcgtacctaggagtcagacaggtaggctgagggcaggcaatgtggacagaaactcataaatactcataaaaagagaaccactaagaaaccacttagaaaccttctgtccaatcggaaagaaatctatttccttaaatacatggaaatggaatcaccctgaagctttcaaaaatactgccgcctagatacctttcctgggaattcagacaaggaggggtcgaactataacatgataaaactcctctagggaattttaaattcacatttggtgattatgtgagaaacagacttccaaccagactagaagcagactcaaatgtgcccaatccaggaccttccgttgattcatttatagtggtagacatgtaacattcgtgagcatcttctttagaaaataaacataataatccccaacaaagtggcagctcattcactgaatgcctactgtaaccaggcattgctttgtatggtgggaacctagaagggaactaagagatatcttctactctcctgacatcccccctcccaaagaggccaaagaaaggaaagtcttatagtaaaaaaattaaacataacataagtaaagcacttatcacagtgtgggctgcccgggatagggaattactagtaataatcatgtttgtgtagttaactaggatggtaatgtgaaattgaataatattttcagttataatgaagcctaataactgtaatgtaagcagaatgcttcatttaaagcaaacaagtgataaataaactgccccagaattagcaactggaaaatgtccttggaaaggtaatgctaaaccaaccttcattggaacaaagatatctataagtcactgctgcaaggatgcactcagtatcaaatataccagctacatagttagacattattcaatccctacttcagagaaacgaagacttcaaataccaatgcagccattcctatctttgagatcttacgagccctctgcaggtcagctccggtaatgcaggagtggccatggtcactggctttcctacattaggatccactctgagctgtaacccacccctaacacagtgttcataattggtgacagctacattctatccatatgtaggttttcactgtatttaacttggtgagatttaacgaggctgattttattggtgtgctgtcattattgtgtcaagtcagggaaaaatttcttcatcctgaatgtctttatgaaggcatttgccttaagtaattcctatagtatacagtgacataaacatttcagtagcttgctatagtaagtatcaagtgggctttcttggaactcattttaatttacagctatgaatgcaaagagaaaggatattaattagctttcaatcttttaggactctgctaaatttataacaattcttctatgtggtctgagattccataccctgtatctgactgtgtgcaacagaacacacatttgcctagaatgttcttggacagaagtttaatgcatgatcaccatgcaggactgaccctgtcatggtgctgccctggcctctagcacacaaagggaaagcctgaagttagctgctgttcagggttttgtggagagacaaatgccactggacccagttttacacatggatccttcttcataatacacatggaatttttgtatttcctgagggcagctgcttcgcattggaataggcttgaggtttgaaatggaaagacttattctaggctacttcattagtcaagggccacagacctgtcagagtaattaaacatggtgttcaaagcacatgcttggaggactagctatgttagggtgaatgtatcagtgtgagctatgctatgttataaatttttcccagtgaatcaatgtatacattaaatagtctatcgttcatattgttcttagtacagatgtgtacacaatgcagagctgtcatgtaggatggatgctcaaccatggtatagtcctttgggaccttatgctctcatattaaagaatgccatttacacatagtagatccctggcttctctccattgaatgcagtagcatcaccccagtgtgtcctgcccgctgacagcccatcccatgttttttaataattctgtggcatttcctgggaaatgttctgtcaggcttcacattccagacattttctggagaaggttaatttccattgctgagtgccccacaagtatgggatgggcttgtagaacactgaacctttcttctgagaaaccgacatcaagtgaccaggccaaatgctatctcttctgtgctcaaaagacagtgtaatcatcacctctcacagcccacagatttggtcaatgtgctggctgtggggctctgtgatcccctgggacatctgtgtctgctcagatgataggcacttatatcctgttaacacttgagaacagacctttccactatatctgacagcagttacacagtgtgtttctcagacacatttctaggattgagtcacaaaggtggagactgggtgagcacaaacaagtgtctgtactaagatatttaagacgttaaaccacaagtattctagatgccaatcttcgaaccccctctggagatatgaatgcatattctgcctgctagatttggagaaaaacaatgacttagcaaatatcagtatactgaaatcttcttagactaaattaaagacagaattaaatagaagttaaggaagaaagaatgaatgatagatgaagaataaatgataactctgtaagtagagtatcaatttggaatggagacttgccattaagttttgctttttgtttcaatttgcagccaatgttttcagttgcaccaagcttagccaccagtgcatcagcagcctttaacccttacctggggcctgtttccccaagcctggttccagcagagatcttgccgactgcaccaatgttggtcacggggaatcctggagttccagtgccagcagctgccgcagctgctgcacagaagttaatgcggacagacagactggaggtaggataaagagttgaacc

SEQ ID NO: 290 - DNA, 4584 bp, Mus musculus
gcagcttggaaattcggtgtcaaagggtctgccacgttttcatgcttgcattttgggctccaaattggcactgggaaggggttactgagcacacggctgagtccaggcctcctctaaacacccatctacttacagtcctggtattcctctcaaaaccaaaacctctttgaattaacagtttcatgctgtgaatttctagcggaggtctttccctttatattgaagtcacacttttccatgtgccgttaaatcggggacgggggaagcagcctttcggacattttcacagttatctcacactctgagttttatcagttcctattttgtttagtttttgtcttttgttttggttgctgatttttttttttctatttttctttttctttttcttttctttttttctttttgttttttcctttttttttttttggagaggggttgggtttgttggtttcattgaacatttaactacctgtaaaatataaacatggctgttagtgtcacaccaattcgggacacaaaatggctaacactggaagtatgtagagagtttcaaagggggacttgctcacgaccagacacggaatgtaaatttgcacatccttcgaaaagctgccaagttgaaaatggacgagtaatcgcctgctttgattcactgaaaggtcgttgctccagagagaactgcaaatatcttcatccacccccacacttaaaaacacagttagagataaatgggcggaataacttgattcagcagaagaacatggccatgctggcccagcaaatgcagttagccaatgccatgatgcccggtgccccgttgcagcccgtgccaatgttttcagttgcaccaagcttagccaccagtgcatcagcagcctttaacccttacctggggcctgtttccccaagcctggttccagcagagatcttgccgactgcaccaatgttggtcacggggaatcctggagttccagtgccagcagctgccgcagctgctgcacagaagttaatgcggacagacagactggaggtgtgtcgagagtaccagcgtggcaattgcaacagaggagaaaatgactgtcggtttgctcatcctgctgacagcacaatgattgataccaatgacaacacagtcactgtctgcatggattacatcaaggggagatgctctcgggaaaagtgcaaatacttccatcctcccgcacacctgcaagccaagatcaaggctgcccaataccaggtcaaccaggctgcagcagcacaggctgcagctactgcagctgccatgggaattcctcaagctgtacttcccccattgccaaagaggcctgctcttgaaaaaaccaacggtgccaccgcagtctttaacactggtattttccaataccaacaggctctagccaacatgcagttacagcagcatacagcatttctcccaccaggctcaatattgtgcatgacacccgctacaagtgttgatacccataatatctgccgaacatctgactagccacaagtatgttacccagatgtagagctgtcgtcacaaaacaatcatacaaagaggaaaggacagtgtgcttgattagagtaaggacgacgtcattagccatattgtatataccgtcaagcaacacatacaaaaatccctcagccacaagacatccacatattgcatgttaaccagaagaaacgacaacatgggaacctgctgcacactgttgcctacacactttgtacattcaattggtatttgtgctgaggtgatattcctatctaaaacaacaacattgtctttcttttgtagcacagagttatgcattaaaatatgcatacgtaattagtttcctatatattcatgccatcttgaaaagacagactatggtgtgaccatgattctattatgtattggtacgtctgtagaccaagatataattttttaaaaataagtttatttctttcaaggtttacaagtaaccaaggtgcaccttgtatttaaaatcgccgttagagctgagagcgcgcatgcagagtcatttttgtttgagagtaatatttttactgtaatagattgtacgacatggtgagggagggaactgacagatgaatgtgccaagcaaaaccacaactgtgtatattttaaagcacaccatggctttaagtaccatgttgttaaggattctcatgaagtgccatagactgtacatcaaattagagtattatttcttcagtgttattgtttctggagccacattttgttgcttatttgctagtactaatcaatcaaagggcaccattcttttcttttttgtttttgaaaccaaagctgtctcagaaatggccaatttaactttacagtaacaatagacagcacaacacaaactcaatacagataacctttcacatactggagatatatatgatagatatataaaattattttaatgcattgtagtgtaatatttatgcatactctactatataacatgttattcaaaagggatatgccatttctgagacacaataacaaaaaatgtttgaggaaattattttgcttctatttatagcctctgtcaaaagtcaaaagactataaatgctttgcagaaatgggttcacgtttgcttaaacgcttcatcacagtcacattcaaaatagtgactctaaacaaagagaacagcactgtcatcagatgcatgataaaccaaaatatgaaaatgggaaatgtttaattaacctagtaattgggtgggttaagtacatgggtgaattttatatgtgattcttttgttcagattaactgcttatagccttagaaagccttttaaaaaaattttaaaaatagatgtgcattcagtttttaagaatggattcatccaaaggaattccccttttttgtggtttggatgttgcagctaggaaaggctatttttgctctgttcagcagttctaaaatcgctgagtaggggccaggtcactggcagttctagtgtggaatgggagaagtgagagttctgttatagaactttccatacttccaagtttactgcaagtttttatgcttgagagagatgctttctaatataagactgatgtgttgattttcctgattgtactgtacatctattaaagccttagattattacattacgggttggaacccataccaatgtaatttcaatcgtgttaagagagtaatggtgacttcacatgttattgtagttagttacgttatagaatattacttatttttcttgttaaaatgtagtttttcatttcctacatttattggattttcattttctattaacagttgaataccatttcagtttttagactattgttttattagattttaccaatgaatttttcaaaatacaaaaaaattaaagtagttttttcttcataacatactcagttttaaattacatgtagtgtcatatgaatatccgtattattgttaactaaatgatttatattttactgatttaatattacagtgtaagaatgtcagtcattgttcttgtctagttttcattaaaagaacaaagatcttttatatggatatcttataaatatataatcattgctaagtaagaagttaagttgttgctatggcaacaatcctggcagacaattgagtaatattttgatgatttattttgtttgtaattagttattatgagaagatctagatcctagatattagaataaaatttattttctactgtatccatttcaaatgttaaagtattgtttaatatttttgaaatccctgaatatcaggccttgttataaataagctgcataatcaataaatagaacaagggactttttgttgataatccaaatactcaaagtttacgtaatgagaattttagcgtgtgtgcaaactcttgagggttgatgatgctgcaatttagcatgttggaaagtctagagagaaggttgactttttgcacttctgtatatagtcaaaagagagaaacctgtataatagcaagatcttattttgaataaaaacgtctataattacaaggagttttgttaaggctaatgaaatgacagactgagcaaaattgcttgcaaaagtggcacagagttagcactccatacccttcaaacacgtcgctttgctttttgtggacagcttgtagtttgccaggatttttcagctggaaagatttgccatccttccaagatctcatgactgacaaaactccattgggccaaatctgcctgaagatcattaccaaaaaatagcaggtacttcagccactaagatgaaatcatggatcagatatcccttacattgttttcaaaactactgcatgtttaaaacttcaacaaaaagagagaaagaactatgctaaggacatatattattcagatcgatatctaccaatttcagtggtttaatgttcacaaaatgaaatcttgaaaataactattgactttcacaaaattttaaccataaacaggcaaaccaaacagcacacctgtagttgttctgtgattgttttttaattgctgtagatcatgttctttccgcaggtgaaaaaaaaaaaaaaaaaaaaaaaaaa

SEQ ID NO: 291 - DNA, 1026 bp, Mus musculus
atggctgttagtgtcacaccaattcgggacacaaaatggctaacactggaagtatgtagagagtttcaaagggggacttgctcacgaccagacacggaatgtaaatttgcacatccttcgaaaagctgccaagttgaaaatggacgagtaatcgcctgctttgattcactgaaaggtcgttgctccagagagaactgcaaatatcttcatccacccccacacttaaaaacacagttagagataaatgggcggaataacttgattcagcagaagaacatggccatgctggcccagcaaatgcagttagccaatgccatgatgcccggtgccccgttgcagcccgtgccaatgttttcagttgcaccaagcttagccaccagtgcatcagcagcctttaacccttacctggggcctgtttccccaagcctggttccagcagagatcttgccgactgcaccaatgttggtcacggggaatcctggagttccagtgccagcagctgccgcagctgctgcacagaagttaatgcggacagacagactggaggtgtgtcgagagtaccagcgtggcaattgcaacagaggagaaaatgactgtcggtttgctcatcctgctgacagcacaatgattgataccaatgacaacacagtcactgtctgcatggattacatcaaggggagatgctctcgggaaaagtgcaaatacttccatcctcccgcacacctgcaagccaagatcaaggctgcccaataccaggtcaaccaggctgcagcagcacaggctgcagctactgcagctgccatgggaattcctcaagctgtacttcccccattgccaaagaggcctgctcttgaaaaaaccaacggtgccaccgcagtctttaacactggtattttccaataccaacaggctctagccaacatgcagttacagcagcatacagcatttctcccaccaggctcaatattgtgcatgacacccgctacaagtgttgatacccataatatctgccgaacatctgactag

SEQ ID NO: 292 - DNA, 96588 bp, Homo sapiens
acatcttgggctcctttttaattacatcctacctaatataaaaactgtaaaggtatctctgtatacctataccatcttgtagaaaatagctatatatttcttaaaatttgtaatttgatttgaatcctcatattttgaagagacttgaagcttaacaagagcttattttttaaaaaacatattctgtattttaaaatttctaattactattttaaataatgaaaatagctgtaatttatcaaaggcctgatcaatgttaggataattctcatgaagtcatttattatcataattccacaaggtagacattttaagtttgcaggaacctgagactaggaaaaaattgtccaaaatcttatgcctaataacagattctaaagcctgtctttatgtctaatagccaaggccatgggaaattacacttaatcttttcctgccctgattcttctaaaaagtgtgtgggtcatgtgcaggccattgcaccaagttggttgtcagggggaggtgggtatgccctgttgccaagagcagccaacaacaaaggcagcagggcaaggttgcagcaaagaccaaggttgcaacatcaataactactgccagtggaaactagcccatgtgtcatacttggtatgtatatatctgttgccaataaccccaaagtagacagtgttttccttttagtcactgagtaatctagtcataaacaaaacagatttacttcatcggctgcttctttcatcatgggaaggaaaatgcccaaagttatgccacatatcgtctaagcataccttctttctaacaattaattttggctgccttctatgaatctgatattggtgccaaacattccctttcccacaagttcaagagtaatcaagaaaagttgacaccttctagtgtccacgtgggcttcttggtatttagggaccttggcaaattatttacagcttctttcagacgagccttccagagctttgtaagaataaacaaacttcaaaggtctccgaaggggaaaaactgtcctggctaagtctataatttaggctatctttagagagtacaactccataaagagagaggtccaagaaaccagcttcttttatacaattaactttttctttacttaattgtaaagactaaatgacaagtaggaaagtgcttttgcagaagcgtgggagtcttaaagctgtagaaggaagaaacactgtgcatgggagtaagtatgtgggtgggagttatagattactgctcttttgctagtctagaataactatgcataaacatctttatagtagtaacttgaacagaatcgttaaacttctattaaaggcacttgatacatcattcaaaataagcacaggttaccttatatccagaaacagaaaaaaatcattttacatccagccaaaaaagattttaaaagagcctttgatttttgacaaaacaagtgataataaaattaaatttttattttattttcaaatattaatccaaaagccgacatgctgtacttcttgaagttatcaaagataagctggctagctttgtctgtagatatcatacccttaaaagattaagcccaggaagtgaatgacagtaacaccaaagactgcaacagcaagagcatagtactaatgatcagtcagagatttcttccgaccctgcctttagaggctatgtgatggacaccttgccacttaacacaaatagtcactatttcatgcaactagtaatagaattctgtccttacaaatgaagaagaattcaatgtgcacatgtagtacaaatactgtgaagactttcaactataatgtgagacatttgaattcaataaaaaagggagagagcaataaaataattataattgtttatctgtttagattcaccagatacacactctcatttttctcattcactaaattttgcacatttatattatttacttagttgatcataattatttaccatttcatattcattgtccttgttatactgcatatttcaagaggcttcaggtctagtttttcttaccatgtagcctcagactctaggaaagactggaattatgccaggtgctcagtgactattgtagactggataggaaagttgatagcaataaggtttagaatgaaaatgcagcagtaactggtgagctggtgacctatggccagaaaagtttgaaaaaggaaaagaatgctccacattgtctaaaaacacattcattactgggagggctcgatggaatcaggccctgtcagcagttactcattgctaagcccattgcagaaacatgggcattcagatccatccaggtggggccaggagggtcaactggactgacggcacattcacgaaggccataaactaagatgtctagcattatcttcaaatgagtttcaagtgaggtatgttctgctaacttgtttgtgtttataatttaactatgttaatttattgaacgaatttataaaatatattgaatgtacagaatagcttttgttgaatacacataattacatgtatgagtatgtaactggtgaagatatgtatatcttcaaaaggaagtggccaaggacacactttatctctcagaggctctgatgtcactctcaagggggtgcgtataatcacaatttcttagcaagagacagggtatagaattttaaacaaacagcaaactaagcattttagaatatgtaggattctcctttgtgtgatcttaactctttgtcttatctgtttttaatcctatggaccactaatgcttacccggcataaagtgaaacatattttggttgcctaagaagcaccacttccaagcatgtgcatgacaaaatgtaccaccttgcaccaccagtttagctatccacagctagtcctaactccctcatttctagatgcatatgggcaccagcctacccaaatctaattctatatgagatcgagtttcctgcagataattctgtttctattgagccaaataaactttacttgccaaaggaaaaaatggaacaggtcaatggattgctacctattctggttaatttccatttcctaaactctagcttcttgcagagtttaggcaagaagctggcaaccttggctgcgctttgaaatcatctaaggggcttaaaaaagatacagacgcttggatgcccctcccagaaattttgatttaatttgtctgagttgcagccggcctatccaaaatgtagtcagggttaagaaccaccgccctagtttcagtctcctcattatgagcatggggtcataattacctcacatacctcttgttttaagttcaaggagataatgtgtgaccttagagtccttaacactttcattactcctttgcttcatgaaagacaaataaaaaggaaggacatggggttggcaagtctgggaaggtgaggaggagggatccttctgcagagttcttccaatgagcagttcattagggttaacaagctatcctttgttaaagcaaacgctcttgagggattaagcctcattctcgccttagtgtgaatgactttaatcagataatctcctatcacctagttgaggatttgttaccgaaagcctaggggaggcaaagagagagagttgcaaggccagtttgggattcactgaggcaagccaaggaagcctcagcctctaggaaagaaacctgacatgtagtaagctttccataatgacagcatgaaaaatctgaacaacaaactttctcctcatgttgctaggacaatatttgttaaaagtgtttttctgatcaagcctcttgtctgtccaatagcctttcatgactttttttctgactttctttctgccatgaagctcttaacaagtatcaggtagttttaccatttgccagctgcttgggagtccgtgaggagcaaggccttgcccagtcctatcctccttgccatctgcttggcacatggtaagcacgcagggtttgttgaatttaactgaatggtttcatttgctacgctcttttccaactgtgatttttccctcacgtctgtccccaaccgctagactatgaacaccttgcaaaagacttaataacttctttatccccagtgccaagcacagcccttggcacataatcagcagtcaatgactatgtgttaaatgtattaaggaacaatagccagtgtactgatgcctaagttaagatattaaaattaatttatgactgtactgctcagttcccactcttttggacaaggcaaagaggaaagaagagaaaaagaaacagatatatgaaactcccaccatttattaatgggacaaatgttgttcttattcaaaggtctctttagaacatctttcgagacatgatttgaaggtaatttcaggaaactcagataggcaagaaggaataagaggagctaacaaaagatccacagagagaactcacacaatggaatgaaaagagagggatgtggaatatcatagaaaccaaaggaaaggaacctcaagaatacaatgagtaagtagatagatacagccaacatttaggaacattgacactgctattggcattgtcaaagattggtttacctttagaaataaataagacaatggccatattttttcatatttgttttctatatggaacagtgttactacgtagaaatgtttgggttacagtacataaaacagtttcactacgacatttatattaaaagccctattagatactatttttaaaagattgcaagggaattctgggctaaataacaacacagaattttatgaaatggtagaaagtgttttacaatattacatgtaattacatattataagcataaatagataatatgtcaattttgatcttctggctgtattctatatttatttttatatccgtttagtttattgaaagaccacgattgcatatttacttgtctttaacaacagtccatagtagaaggtacgcatacatcccaggtagagtgtttataaatatattacacattagacagatgaattcaggagcttggggtactggctgtgaaacactgtggggcaggaggcttgtcctcttgttagctgcaaggctttggtcaagggccaactctccagcttccattacctcatgaaaaatgaagattatatataaatgacatgggggaggtggcctttgttttataagattgtcttaaaagattaaatttggaaaagaaattgcatatatagtacaatattaactatgcttttaaaaatgcattggaaaagcctagaaggaaataaactgtaatacaaacagttccctatctctgggaactggaaacactgctgatatcaaaatattctaccttcactaatttcgaattttctatattgtgttgactccaaataataaataagtcacacacaaacaggcataccacatctcccttccctcaagttatgttatctcgaggatcatgagtcttatggcttctcttcaactctgagatgtaaggttctaaggtttgttgtaccccattgccgagggtcttcaaccaaatcacattccgctgctgggtccccagccatttgctgtctgttgcctcctagacagagcccacttttggtttgctgtcattctcagcagtggtggacttcatgcagtctcttctgagattagactatcagcctttacacagcagtcaagagttatctagttatctttgtgaaaacaaaatttagataatgttccatcaccccaccccacccctgcctctaacataatcaaacacttcaatggttcccagtgaggaaaagtatcatggttgtagctttgcattttgagtgtgattaatttgatggagattcattttttccctcttccttgactgtaagctccttgaggttaggtagtttttgttcaccattggctctctagccctaccatgaaccctggccttagggctcttgccatgcagtccccactgctttgaatgctctttccccagttatttctcacttcaccgagaaccttgcctgcatatgaccagctcagtcctccatcctgtttcacacaaccttctctcccaaatccccccaacctgctttatttcatagcgcttatctccatctgaaattacctcatatgtttatcttttattttttatttttgacttattttttgttgcttgtctccccctagtagaatgcaacccctttgagggaagtgatttatctgtgctgttcatttctgtaaccacagtacctagaataggagttagccatggctgatgctcaataaatgtttgtgaaatgaatagagtcattgtgtgaaaagtgttttctgtatggaaagaagaaagaaaggatgaaaaaatagaaagaataaaagaaggaaaaaatgaaagaaggaagaaacagaggaaggaagaactatactcttggaaatctcatgtagcacctccttacattaaactggggaaactgttaggcctattttagagcttcttcttgtccttattgtctttaagaaaaaaaaaaagacaatgaaaatgaatggcctgagagagtcagaagacactgatgtcagttctgctctgccatggtgccaagttccttaaataatgcactcctctggtttaacaagggaacaaggccagatgctctctaacattccattcaatgctaaaattctatgattttgaacttttaatttcaaaatgtatttgcttactgtctctctattgccagatcctaaaataatgatattgaagatacagattcaacttttaggtaaaataacttaattgagaaatgcataatatttaactgctttaaatttcataaacatttagtagcaaatatattgattttatatattttcacattcatgtgcaatatacgtgttatacatacaatatattgtattatatatcaaatatatacatagtatctattagaatacatatttttatttttaaataatgagcacaaagaaattgtgttgtgtatgaaatatataaaggtccttgaagataaactaaattcatgtaattctttctctcaagtatatgtattcaaatatctgaacaagtttgaattctacaaaagaaggtctcacctctctcctcaaccctgttgtgaagtttaatgtgataaatttaatgcatctacttaaacttgattctccatacaagaatgtttgcaacttttgattgccttttagagtcatcttctcttgaccatctatatttaaatattgattaggaagcacaggacatgagactaggttctggttttgacaccatctttcaatcaattatttttatcctggtataataaaaatagcattttaaaagagtatacctccttgagatatttttatttaggtgatttgtttgtgtgagagtgtgtgtgtgtgtgtgtgtgtgtgtgtgtgtgtgtcaggaaagacaagttatattgcagaggcagtgagagcttattgagctatgaatgtggtatgcagaagaagtaagtcacaattcacacaggcactcacacacttacataggtaccttaaatatccccattggactgaaaaagataaatgctgccattatctttatctttattattggtaaacaaggagctgacattatctataaaaaccatattccttaactgtatttttattgagattcattggtataattaaaacttgaatggactgaaatatttcaggaacctgcagtgaacactctttcctttatctgaaaatgtagtttatttcatctgaaattgttttctataatttccctctccacccataaatgaccttctttttatactcatggatatactcacttatgaacctgtagactatacacttcacagaaataggagaaaccataatgttctcctggcactgagggaatatcaatggtattctaaatgaggaactattaactttttattacaataatgattttttagtaatttccatagtttgaaatgtggttaggatgctactggcagttgaaagctgacaacatgattgaatagttttaacatgatctggtgtttgttacagtgctttaaaattttaaatattatcattcatgttataatgttatccagtgatagtcaattaggccaaatcagtggtaatttagtgttatatcacaatttatttggactcgagttatagattgaccattgctttgtgagttttcttagccattctgtttttctgtatctaatgtaaaataacattttttctccttttttatttaccaggatggttattctactgtttctaacattaaaggatcatccttgtatttctttgtattctgtcatggagtaaaaaacatgtctcatctcagtttccatttctcttttgctcccagaagtcccccctcctccagtgttgaagtagaaatataatttccccttttgcaccataagcaggttcaaaagtcctgtgtttcaccatgttgctccaaacagcaaattttctaacccacatgaaaaaagaacactacagttctaacttggaattctacaagggtttgagaacaattgaaaataaatttctaccactaggattagtccttagtggttcgcaggcattctaagcagaggggcatggaagctagctagggcaccaacctgctagcagatgcaaagtttgctctactaagaagttaggcctttaatatcacagacaatgggaggcaaaatgaagacataaaaaggcaagtagcaagcaattcagtaggctaagccagggatttgagagtctcccaaggctcctcccttcctcattccctgcatgagtcatttttccagtctgtccacacccattcacccctccatcccacactctcattcaccctccaagctgccgtcacaggaactttctgcaatacaagtccagactccatctctggcccttgctgcctaaactttcctagttcattagttttggcagtaaagttgagactcgttagatcaacacagacctacttttagtgtcatctcctgccactctcctgtactaccctaccctcgcttctcacagaaaggctgagaaggctggcagaccccttgtatataccctgctcctttcgttttctttgagacagggtcttttaatgtcacccaggctggtctcaaactcctggcctcaatcctccctccatggcctcccaaagtgctgggattacaggtgtgagccatgccatccagcctgccctgctcttttctcttctccacctggactctactcccttttgatcttgccaacttctacacacctttcaaggcaccagttaaatgtaaatcctccaggaacccttcctttgccatcctcagagccctcattggattgcttcccacatacagcacttatcccttatgcagaattaatcggtttgtctctcacctactagaggcgttatccttgagtgtagggactgtcttatccattcttgcatcactggcatagtaggcactaaatgtagttgctgaatgcttaataagaggaatggaagtcttcgtagcttggggtagatactaatgggcagatagaaagttcccatccctgttctctgagaaagtgtcagtgttcttttagtttgcttaaactgtgtgggtacttgagtccttttaaacgattaacgctgggaagaggcaccatttaattaattaatttgttctggaagggatcagtgtacaattttaactcagtgctttgtggatctagctaaaggtcaagaactaaagtcggctattagtgcctctggaagatatttctgcactttagcacctttctgatgtttttccttcacctcgagctggcctcactctcttcaacaaaaccgaacctgcaggaagaatgttgtaccatatccagcatttttgtcccaacaaacatgggacaaacgtttttcactagaatcatccttgaacaagttatccgaattccttacattcaaaggaaatcctgcccccagtctccaaaacttcatcacatcacagacgttcaggattctttccattcaaagcaaagccaagttacatcttatagcacccagtgaattatgatatggggctgcggtttatttgctctggcgacaatatggcttacttgccgtggaatatcccggtatttcagaagtaacatattatttttaaagagggagctttgctttctctaaatcacatggtgcaaagttgggaatacagtggcctgtaaattacaaatattatttacaaactagaaggaaagctgacatgtgtttgtgcctgtgtgacagtttcactaaggaattccaaaactgtggatagcctgttacttgagaaaaatacacggtggcagtcttgcagatgtttttcccgcctgttagccctccaggttcaaaaactgtttggtgcattttaaggcggcagtctcaccagatcgcaggattctagtctaattggcttctaaccttcaatctaaccttgccggcttccttgcaaagcccggtgcaagggcctctttcaaaatgaacccactggtgtgcctagcagtcggtagaagaagcgggagggcgtccggtctgcacgcccgccgcgaggttacaatgctgaacgcatgagatggaagataccaacgggaggccgaggggatccacggcgcccgcgcgggctccggcttcctcctgctctcggcgccgctgggcgaccgcccatgacccgctcttgcgggctctgtccggttgacaggcgaccctgtggcccggggaagcgcgggagggcgccggcggaaagttgaagagcgtttttctcgccgccgcgtgcattaggagctcgacgagtccgccctgggcttcctggtggggctgggcgggcgggggaggggccgcgcagcagcagcggaagccagacctcggcgataagaggctgcacagcgacatgcaacagtcttttcactgcagctgaatgagttgtggcgcccacaatgctcccatgacaaggagctgacaagttccattttccgtcgcgggcatcttggaatcatgactcccacaatgccttgggcacttggtcgacagtggggccgcctctgaaaaaaaaatgtgagaggtaagtttccattttcacagtttccccgcgccgcttcattgttcggactccggcgggtctgcccgtggctgaaggaggaagtgcgaggaggtgctcgccggccgcggttctcccgggcaggggcgggccgctcgcggtagttggtttcgcgtccctcagcacctcctgcccgggggaaggcgggagggtgagccgcagccgctcctgcgcccttccctgccgcgggctctgcggacgctgtcacggcacagcccgcgcacggcttggcagcccagcgggacccagggagaaacaggggggcgagaagagaaacaggtgcgtgcaagtgtactcacaacttaatgacctttgtcgggggaaggtgtgagtccctctgagtcgagcggcgcgcgggtcttcccggcggctcccgcatccctggccccggggctgccatcccgcccggttttcatctgggccaaatatgtgcacgcaaaggttaattctctgcttgctacccataaattacgcatgacatgtttagctgggctgccttatatggagagtgctgtatttcaggccagtttgccttttgccaagtttacagggcggaagacgccctgtaggagagggctgcctcctccttttcttcttcttcttttttttttcatcgttttgtagtgcgtcactcaaaaactgtaagaaaagtaagtatagaagctctttgggtggagccgcagttggttgaattgctttcatgaaaggttgaaaagaatgaaaagtagttagtacttgggttctggtttttagacaaaagcaggacaaatatgtagccccccccccaacttttttttttttttttaaacggagccggaatctgttattggtagtaatgtgtcatgtgagaatactttgattccagagcctgtaacacgagcaggtatatggtggcgcttatgccttcccctcgcacagcactttacaactacaggggtgttgctgccagagtaatattgtattcttaaggctctctggggccgggagagtatgcggctgttgggattctggggtgtatttccgtggagtatgtctccccaggattaaagttaagaagctgccggaaaggttgttgccgctgacttcactttgtgtgcccaccagcacaggcacaagtcatagcagatggatggcaaactctgccatatactctgaggagtttcttaaattaatacgctaggagagaagtcataattaatgcttttagactttcgagccctctgcagcgtgctttgaaatactacaccggtggacactatgtcccttcctcctgggtttgaacacagtgtctgtttatacacagagggtgtttagtacctaagtattctataccagcacaagagagccactccacagttatctctctgtgtggattcctaagtgtgttggtgtttctccttgctgttgagataaaatattatcacccagagagaaaatgaaagttcaacgactgtaaaatttatcccaggaatgtgcagttcaatacttagaatgtcttagatgtagttatagatagaggcactgaataagttattttgtagcctgagaatgcacatcgctgtcacttgtatcttgctttcttaaagttggtgacaactaaggctaaacttctttagaaaacctaatgttctagtttttatctgttttgtgtatttgcatgggagttactttattattattattatattgttaggtcttctttgaaaatgtaggcatagcttttttagtcttatttgtttaatggggggtttccttgctgaagactacaaaagttgccttttgtgttttaaggaacaggttgggtcagcaacagaaaacctgttcatctataattatagtgtcacttaagacataataatcagatttcattattactaagagactcagaaaaacctcacatatgcctagtttaatttttttccttatgtaactgtgaacaaatttgtgtgtagatacacatcaagtgtggtactctgcgcagtcatgccaaagagaaactgaagtgttatatggtttgagatattattgcttgtgtttacatttccacatttgaggcaaagttagactccaagttgaattcattaaattttgattccaacattctgttcttcctttgggcacagaattcctatgaaatgaaacactgggttttgttccagaacaagaacagactaacccaaaatttctcctgggggaaaaaaaaagagtaaaattacatttctcattgaaaattgtatttctcattgaggaagggtgtgttactttattatataaaatgccttatcttcattataagaaaaaaatgcccttgcatttgtcactgttgccatacattaggcctgtatttgatagatctatatggaaacagagaataaataatcttgctgcaccttctggctttctgcttggtgatagatgtgcggattagagaacatctcaggtcttggttaggagaagctgaaaagaataggtgattgggtttttaaaattctgtatgcaaaggcattagggtgggtagtagatatgagagtcaaaagagtggaggaaagaagtgaaataggttcacgaagtgattggcccaaaataaaatcccatcaaccatatggatcatagagaatgtgacatagaaagattttaaagtgtatggtttttttaggccaaaaagcttcatatgtttggaaatctagaatgtgctgtccagtacagtagccacatgtggctgttgagcacttgaaatgtgtcttgtccagattgagaagtgtaaaatactaccggttttgaaaactttatatgaggggaagaaagtaaaacatctgattaatatttttatatttatgatatgttttaatgataatttttgatatattggttctaatagaagatcttactagattaacttcacctgtttcttttctctctctctctctctctctctctctctttcatggtgtctagaaaatataacaaatgtggctaacatcgtatttattttggacagtgttgttctaggataaagcaggaaaacaatattctgggagaaagcttaaagattttgctggtcaaaacaataaaattggcttattttattatacatagaaatacctcgtctttcttatccattgtaaccaaaatttgagaaaacacaccacctaacatctatttttatttcctcaaagctgctatttagtttagagatttgatggtgaggtagtaataatagagaaaaacttataattagagaatgagtcttaacacctctcaaaggccaaaatagagtatgattgttacttaggaacattttagagacactgtagttatcattgtcctgaagttaccaaacataaacgagtcactaaaattattttaaaatagagattttagtaaatagcaattatcttcaaatacttaatatgtgttttcttttgctagaactttctttagaaagttaaaaaaaaaaacccatatccaaagtcctgagcaaatgttaataaaagattgctgcattcataagaatgaaagatttttacctgcagataggagggtattgttttgaatattagcaaaggtgaaaatgtgtttctaacgtaacattatgggctctgaagaatttctatacatggagacactgtctttataatttgaacacattcttgagaaggcatctgactggtaaacaaagcacaatggcataggtcctggaaacattcctttcagatattttcataactgaagtacattttgccattcacagtgagtgttaagctgaaaaaaatgtggttcttttctagccatataaagtatgcttactattattttctcgaaggatgccaaaaaatgtaaaatggatgttgtggattcttcgtggggaggttagctagtttgtatatagagcctcaagaagagttgcctcagcttggtgccatcttgagtctgtcttccactagatgaggcatagcttccattagtgtcagtgcgtgtgtggagggtgaggggaagaatgatccccattaactttgtatattgtttctgatgagtcatggagcatattcactaatggttggagaattattgattgcaaggcagaggattcaagaagagctattggcatatggcattaactgtctctagacatattttttatttttaaatttgaggtagagaaatcggtttttacgtagtgtttttcatattataaaaaataaacgtttatataagcattacagatacatccttgaggaaaaaaatagtaaatacatggttatagttttctacatattaccagtttttttcataacagatccagaacatctctttcagataatcgttcatgtttttagagaggcatctcatcatatgtgcctgtgaaatctgtaaaaatatgtgtaacacacatcttgaaatatttgtgttaggagaattaagtcttacacatttggttctttttctactgtttttgattatgttctctaggttactatgattatcttttgttaaaacagttcaggaaatattaatctcaaaacgaaatgtagccatattggacagagtagagaattgcttttccacagagaccagttattccaaaaaggtgaagatgtttctgaaataatatcatgctcatatgctccaaaagaaaaaccatcatctcttttgacattcttttaggaaactgagagatgtatgttttatataccaaaagaggtgaataatagttgataaaggtatgcaaaatacatactcctgtgaagtgtgaacatacaatttgtatgtaacgcatgcatgagcatataactttccccaagacaatgccaatttattcaaatcacctgaatgttaaataatatcatactattaagaagaattgtggtaaatatgaaatctaaataccagtgatgatgtccatgctgatgtcaactccattccagtcctgctttagctaaattcacaaaatgaagagatgtctttctccaaagtagttttccaaaaatttgtatttgacactggattttttcctacgttttcacttttaaaagtttagaagctattaactaaaaatgaacttgttttagagagctaagaagattctagatttatggggacatatttagttctatgaaataagcattacgttgctgacttgaaatattattctatcatataaagttgatttataagtgaatacatattgtgaaaaaataccacagtagacttagtgaaatctaccaaacttaatcaagatagatatacgttgtcctcaaaaaaataagaatctggtagggaaaataagagcttcgaaaataactataaagtagaaagtgatatttaataaacaatggctgggtaacatggtatgaaagttcagataagggaaagtcttaagataactctgacttgacccacatacatgtaataaagggaacagtccttaaatgcataaataatgggaacaaaaggtattcagtatttttcagccttagcaaaatattattctgttaacgcagtattctattcagcaatggttccatattttccatatgtttatagataacattcagatatcgaattttcatatatgttttaattcatttatttatttcttttatctaggagaaatataatggtttccaaatgtcctatactagattattgatagattttgtcattagttttactattgaataccatgaaatatcagctgttgcagccactaaatagttacaaactgttggtactacagtttactagtcaatccatggttatatgcttgtgctatgctaaatataaaggattcaagatgaggacttaagcagttcatatttgtatttagaatattatcaaagatattttcttaacttgtctcagtattagaatttacagcccattttcagcttattgtatccagaaatttcaatcatatccaataatttatcagcatttgttgatgacagtaaaagtgacacattagcattttatttgtttctgtgttgtttgattacaacagtgacattttagcactctttgtggacggataactcttctagtagaaagaaagcaggagggtggtcaagctaagtgacagatacaaagagttggaggacatagggctttctgtgggtaagaaatggatgagaaaagctttatgtcactgactaggcttgcaattcagtattcccctatcaaaggcccccttactgatgtttctgtttaccagatcttggtttcaagatgccaggttctgaagagatacaccacgagttcttataaacactatatctaaatttggtttgaaagtctaatgtttggctgtgtgcagtggctcacacctgtaatcccagcactttgggaggccgaggcaggcagatcacgaggtcaggagattgaggccgtcttggccaacatggtgaaaccccgtctctactaaaatacaaaaaattagctgggcatggtggcgcatgcctgtaatcccagttacttgggagctgaggcagggggattgcttgaactcgggaggcggaggttgcagtgagctgagatcatgccactgcactccagtctggcaacagagcaagactcttgtctcaaaaaaaaaaaaaaaaaaaaaaaaaaggctaatgtttataccaggcaggtagaaaaacaaaaacggacctcattagaggatacatgaggtttctaaaagtggaactcctttgtaaatgtaagaagtgatatcaatattattattattttaatatacttattttgaagtaactaagtttttttgtttatttcttgaaagaaacaatagattggggaaaaaccatttactcttttcatgccctagtttctaaatctgtgacattataaaggtgtaaatatttatgaaaatagtagaagttgccactggctgtattcttttaagtaaggtatctcatttaatcttttctactgtaaagtagccgtaaagtaataagacttttaccttaaagatcatgactagaacaattttttcatttgcggagatatgaggcttgtcatttttattattccaatgttcatgtttttaaccaatttttcttgtcttgcctccactgattatatataaagaatagcgatgagaatatagctgtaattatgattactaacatctttgaatactttctgtgtgctaagctaaggtttataattaattcatttattcctcagaacaaccctatggtataggtactgttaatattctgattttacagataggggaactgaagcacagacaagtccaattaattgtgcaaaggtacttaattaataagtagcacaataaggagttgaaccaaggtagcccagctttagaatccatgctcctgtgtaaaagaataaaaacagattttaaaaatacttattttggatgctgataggagcttgagaacataaacgtttggaatactttaaaagacttgtactttctacatcatttgaagagattccagaagaatgggcagaaagtaagaggatagagagaaaaggcctggggtgaggggtgggaagcattaataggataggaagaaatgaggaatcaggtgttcaagggagattggtgctacacttttgaggtcattgatgaccagctagtaagtttaataatacgtagtgtggaacataaacagacacttggtgtttagggtagtaaccttacaggagttgtgttttggtgacattttataggggtaggacacatatagaatgaagtagagattgtggttatacagaacagagatgagggactagatgaggggagtggccctagaatgaaaaggaggacatgtatgctgagagaaatgtgataaggttaggctgcataggatgtaccagctgactggatgtggatattaaaggcaatgggggtattaacaattatttttaaaatacagcaagaatttaaaaaacttttaatcaatcaaaaattccttatttaagaattatataaaatatcagtaagtgaaaaacatttaaaattgtattttatcagggattataacttaagtagaagatacatgttaatttcttaaaacatttcatttctgtgctaagctctttcaaagcactggatggtgatctaaaggtcaccaaattctttgtcccaaattggtaattttaaagtaaacataatttcaacgttaggcctattttgttatttgctgagaaatgtctcaatgtcaaccaggcagttctcctctcttattaaagtccatgctcagaatgcctgtgtaacctatccttagtgataaacaaggtggcagatagatacatgataaaacaagtttgccatgtgctcaatgtggctgacatttatacttctcagaccttgctattttagggaaggtatcagtataaccagggcattctttttcctggaactaaaaatccttaataatcagtcactattataaacagaatgatttacatacaggaatcaataaacagttgcttttggttaatggttatctggagtaggaggatagttatatttcaaatagaatagaaagctttattggaatacttacatgtctttttagtttgaggaccttacaagctttttacaaataaatggtttaaaatagtttaaacagaaaatgtcagaacattgatagattatgttttatttaatatacagagaaaaattcccatgaaataaagacagttttcaagaaaaatattctatttataaatatttacaacttattagttatttagattgcccgtgtccataaaaataatacagaaattacactatttatgtctttaaatatagcatgtttctataaactagagaataatgttgacagtattttattttgcctttgttagtattatgtgaaagtcacacttattacatgcctttttctattattagactttttttcctatctagtttttgccttgtgctatacagtatggtgaaaatctatttagctatgtcattaagataatgcttagaaaatgctaatttttaagtaactaagattaagtagtattggatattctttgccttctttattattctgtcattgggctaattttaactagacaaatttattccaaagtattttgagccattatttgaacttcattgctgtaacattcaggaaaaactgcattgtctacctagtggcattcagataaggcatttggtcttaggtacctcttccaaaagacttttaagaggtttgataagcatagcaaaagtgaacgacggaggatacaagaaaatctttgatccaggagtagtctctctgaagcattgcatgacctttccaaaaaataatttgagaagtgcctaacaatagaaaaatatatattttttccttcaataggaaagactttagaaaaaatatactcaagtagaattctgcataatgctttctgggggaccacatttgctgaaaattgcctacgggaaatgactttctcagagtgatatagttttgaggactgagattttaaaagtaaatattttattgggagcaattaatttaggaagaatagtattatgcctattcctctgtagttgattaaagtttactaagtgctgaggtcttttcccttaaaacattactttgccatgttaacaatcaggtcatagaggaatgaattcatcttttgtgttttgctaaataatcagttaacaaacatattctgagcacgtttaaagtcaaaggattgtagtaggtcacaagagggagatcgaaagtataattacatagtgtctttccttctttgacatacaattgggttgaggagaaagacttgaaaacttaatgcaaggcactatacaagttagtaccaaaggaggaaactgaaagagggaaggaaattcaaagaaggaagtttttgtggaactgaatggcaagggaatgctgtggggaagagggggcatctgtcataggcccaaagattaagcactcttttcggaatatggagtgacatagtaagaataaggtggaagtagtgatgaaagctaccatatttgagcagcgtcttttctatgtgaggccttgctagcttatgttgtttttggaaaaaaacagatagacaacctggtagtgatagtagacaatgaatgaattgggccggtgagtcaggaatcatcatcctcttagaggacacagacttagagaaattatcttatttgcctaaatccacatagctggtgatcagccgaactgaacagaagccaggtcttttcatacttcaaaaccagcattccccaaccccatccctccccatcccatgattctgttgggaatgagtgtggcatgtttatgacatagtaattttaaaacttcacccatacaacaactgacataagtcaagaagatagaaattttatttaaaaggctgtcaaatgtattttcatcttttttgctttgatgatgggttacaaatagcgtatcgtttgacaaatgcttatactctgtttcttggatttgtaaaaaaaataaaacaaactaggcctcccatcttcagtagatatggtatggagttgcagtatcatgatgttgtaacagtgcatttcgcagtaggtagacccatttgggattccctcagaggaagcttgtgaagtttgaagataatgtactttctcaccaatagtatgaggctataaaattttcaccaagaaatgataggggcaaaagtttatagatcatggttgtttgattattttatgcttttatgttacatcatctaatttatacatcagtctctgctctctgtaactttacatgtgatgtagcctgtgactttaaaagataagctgttaattgtagagttgtgctgttggagacctgtcactttgctaacaaattcctctcttcatagagctatttagaacatatggcaaataaaattatgtgattatgtgtttttagagaaaaatttatttatataaaatgaaagtctttgcttttggctgcaaaagaaagcatccttaatagcaaatattgattgcagtgccagtgtgccatgtatcatgctataccctttggaggaaaaagaggtaagatgtgcctgttctcaaagtaatttccagtatagtgatagaaatattcacaaataatggacgggcaaaacaaagtgggcacaaagaagccaagaataggctgtttgtgggcagagtgtggaatttgcctaaaaccattcggtagacaggttaactctttagatactttgtatatattggagaagagacaaaatcaactcataatttattaaaatgatgtgatttgatatgtacaccatttagtttttctgttcaagtatttggtaaataagtgtgatgccagcatagtatcatcctggactagacagaagaaattaatttatttctgatgctggcagttttggagaaaggtgggcacatacggttcatctgaatcttcctcatgctaaattcttgattggaagcaggttaaaacactcaggttaacgtttatgttaacagaaaagaaaaatcagtcagagagaggtgcgttgtatttaacattaatgacagagaattttaaatatgcacatgattctctttttcctccagcttttctttctgcacaggaaataaagctgtattttgtaggccagcttccagactttgaaatggtgaaagtgcaactgtgcatattcttctataagaccccattcagctgtgacgtgttgttgtttccaagatttaatctgcattctagtttagaaaattcaggattttattgcttattattattcatttttattcataaatatttgtttaaagcccattacatataaagttttactataagattttaattgaaatttttaagacaaattaagaatatggtttctgattttctgaagtttatggcctatagaaaaaggtccattcataagtgaaataataaaagcaaaacaacaaaagactcgagctttagccattctagtaattattaaaatagctactttcttcgtaggaacttattattttacatgtgtgatcccatagctcttacacaattctgtgtgatttaggcattgctatctttctggctcccaagtgagaagattgaggcttggaaagattaaggttaggggatttgctcaagggtcatatgataaggtactactgtgagagctgagatctcaacccaggagttttgctgtttttctgcttgtttatttccatcagtatggtatgaattaggcacacaaatactcattgcatgtagatttgggacctactccaagttaattctggaaagactcagtgaagaagataagatgtggaagaggttttttttaagcattatggtcatgaaagagcagactatggaatggactttgaagtttcactagctttgaaaggaggggtatatcaaatggcctaatctgcctgtgtggtttgctcagtattagttctactcatacctaataccctctgccccagcactcgccaagatcagcaaaatctacttttagactcaaaatcattaccacctgtgaagtttctgatgtcgcttctgagtgacatagcactctgtcaattgctctgttggatggctttgctgaatggcaccttttaagaagtgccttgagccccaaaagagtttcaaatgctcttgtaatctattcagctgcattattgaagatattagggtaattcaattcattttttcatcactaaaacatagaaatctgttgccaacattaaaatagacaaacatatcattgaaaatttaatagctctacattcacttggagatttccgataaacttttctcactttcccccaaatccttaataattagagcatgtccatgtgtgtatgtgtgcatgtttttgtgtcatatccctatgtgtctatatatatattccataaatgattgtgaagtggtacacaagttgtagctaaaaatgaaatagaataaatgtatgaagctaagggatccattctccaactaatgcgttagttgacaaatttgctctgaaatattgataccattttgtggttccctgtattgaatacaagtatgggcttgtgaaaatatagtatccacagaccctaattagaaacaaaataaaggtattctaatatacctatgcaaatttaaagttttaacttattcatataacagttttcagcttgtcagtgacctgatatcaatggatttgaaaatgattttacctttaagtaccaagaattcttagggacatgtgtgtgtgtgtgtattcagattaaagattccatgctaatatactaattttttggcaagaaaattaagcacctgtatttcagtttaatagtactgtggtaaatgaaatatattaaacatgcagattctgttacattcacctaatattaatttgaatttttaatattctaggcactgtgctagatattgaatacataatggtaaacataaacagatagtaaacagttataaaatttagacatctctcaattttcaaattggccattgcagaaatagtgacattttattaggttttgttgccacaagattttcaataattaaaaaaaaattatttatagatgccagtaaatatttattttacagcatctagatgccagtaaatatttattttacagcatctaccaatgttagatttactatgcacgaaggaaggattttattttcatgtaaagaaaaatgccattttatgcttagaatcaatgctttacaattaaacaagagaaatagcatcacaaaataatacgggaagagaaaactcattttgagtagcagcaaaatattgtgagtttaaaaggtcaggccagtacaggaggctccagttttgccactcactatgcagaatgctgtgacagccagggctgatacagctgaaaatatctgcagctttggaagccttgtaagtttcagaaggtcattttggcatcatgataggagcacagattcacatggaaggtcaaactggacagccaggcaggaagataggttgctgaacccagtgcttgtagattttagagcaatcaccaactgcagtaactgagttttttaattcaatgcagccatctttcattgtaatgtttattggggaatgagctttacttggtggggaaattataaattaccttctctcttctgaaacctaagtgttgcatctacaactttccctggtatcaagacaaatgttactttaattttatttacgtgtgatatataccccatcaagcttacaaaagtaaagtgcacatcagataggactgttgttgttgttggtggtggtgtttttaatcaattagaaggcaaagaaatgaaacaagtacttatgatgaaattgagcactaaatttatctctcagcttcctggcaactgaagcagaagctttaggaagtgaaaaagtcctgagtttatttaataagatttcttcagatcccatacactgtcttattcttagccctttgggtgtttagttaaatatactgactctgcccttgggtgaagtcttgaatgggtgaattccaattactaaaaaagtgaaggctgaattctttagcctgcctttaaggcccttactgatttggcttcagcccaaagttccagggtcatcttctgccagccccattacatacaggtgttccatacagaccagttcttccagtgttgatatgcagtgctttcccacatccctgccattactgtctggatttctacagtttggatttctactcctttttgtctctaaccaaatgaaacttgtccttccagaccaaccttccatttcttatcccttttgaaactaaccttgacctctctctttaacttaccaagctttcttgttacctctactgtgtacttctcgcttccttttttatatatagttatttgtgtgttagttttatacctttaattaaacatcaaattcttaaaggctggatccaagtattctcgctatatctaggctacatataaaaggtggtcaatacacagttaatataatcaatacacatattttatgtgtattatatattgttaatgaatatattcatttaataaagttactgttgaatgtatttgaatttcttgaaggaaaacatttcttttcctaggatagtagggaacaaagaaagaaaacctaaaaaaagaagcacaattagagaaacacactcctgtaatttttctcaaaggaaatattttgagacagcagaaccaagattataattttttttaattgttttgactttgggttttctttttataagtcagcttaatatttgtgatttctctgtgccaaaaagtaaccaatattaatagagaacagctttagtacatgtaaaagaaaaaaatcctttatgtcatttcaaaccctcagtgctttctttctgacagatttttaatggttttatcagctgttaattaggttggtgcaaaagtaattgcagttttaaaaaaagatcgcaaaaactgaaattacttttgcaccaccctgataaaaaattggcctgactatattgctttgaaatgtttcagacagtattctgtctccttcattgctcttcagatactgttttagcagtttatctagatcagtcttactgtgtgcatagtcagcatacatcagttttatacttttaaagcggcattgcattttacctacgtggaagttttctgcagacatattttaagcttctctaagaaaagctctgaagaaaatgtaggctcctgttgctcggagggctgatgaataaatttaaaaaaatcatgctcaaagaccacttccttgacaattaatctttcaaaatcagctacggagtatctagaacttcataatctattcaaaattgattaacaatcttaattgagaagacatttgtatctgaagtgtagaattttcttgtctccaggtatacattattaatgtttagtgtctaccccatggacataaaagagcaatagcatccgttctcagctctgtaaaagagaccatcttatcttctctagaatcaatattcaggggtttctccttcacttacacacacctcactctgagctaaccacaagcaatgcagtagtggtacctccaataaatcccactcaccccctatctctctcccttcttttggcttctgttgtatatattagtagtcattgtcatttctaccaagtttggtattaaattgctagcatgtatcgtgtatcgtgaatgaagttttacatttgaaatcagaagagctgatttggagttctggttcttccatttatttagcatagggattttaatgggtcagtcacttaaccatgcaagcctcgcctcaatttatttgttcacaaatgagcaaaataatataaccaaccatctcttagagttgtgaggaacaaatagtaattaggatgaaaataaattgtatgtcaacatataaaatattatttgctatttttgaataatagaatgtataagttgttgggaaagtaaatttctatgcttggcttcttcagtggaaactttttttttttcaattttttttttttttttttgagacagggtctccctctgttgcccaggctggagtgcagtggcatgatctcatcttactgtggcctcccgggctcaaacaatcctcctgcctcagccttccaagtagcttgtactgcaggcatgcaccaccatgcctggctaatttttgtattttctgtagagacggaggtctcactgtgttgttcaggctggtctcgaactcttgggctcaagcagtactcccgccttggtctctcaaagtgctgcgattataggtatgagccactgtgtccatcctgaaacttttttttttttaattaaagaaccaaatgaacaccttgcagattttatgtataagccagaaagaaagctcagtacatgtatagaatgtagcacaagccaacttttcaaaaattaatctttttaaggggcattatgtaatgaaggagcatacatttttagttttatccaggataaaagtggttctttttcccccattaactttaacacagaggttttactttaatttaaattccaaggactaggtttttgttgtatatgaagaaaacgatttgactaaatccaatgtaaatgtttttccttattctttgggggcacacacatacacacattaatccttattttatattttatttataatataaatatttaattatattttatttataatacaaatatttaattatattttatttataatataaatatttatattttatttataatataaatatttaattatattttatttataatataaatatttgtattttatttataatataaatatttatattttatttataatataaatatttatattttatttataatataaatatattttatttataatataaatatttatattttatttataatataaatatattttatttataatataaatatttatattttatttataatataaatatttaattatattttataggttgaataggttccttgtttatcttttttgcaaaataattttattgttataaattgttcttattataagcaataaataaggaacctaaatatcacaatctgtaaagcattttatttgtgtgtgattttatatgatagttcattagacattagataggaaagtatggaaagttttgagattgctacatgattgctcttttaatttgtccaatgtattcctttaaatgttgtgagggatttttttaccagtgaagtagcttttgcatgctaagttgtagtgaactgctgggcagaactaaaacataaatggtttgaggcatgattaatagttgtatatggtggccgggcgtggtggctcatgcctgtaatcccagcactttgggaggccgaggcgggtggctcacgaggtcaggagattgagaccatcctggctaacatggtgaaaccccgtctctactgaaaatacaaaaagtagccgggtgtggtggtgggtgcctgtagtcccagctactcaggaggctgaggcaggagaatggcatgaacccaggtggagcttgcagtgagccgagatcacaccactgcactccagcgtgggtgacagtgtgagactccgtctcaaaaaaaaaaaaaaatggttgtatatggtgtagtatcttagagtgatgtgcagtggcatgcatgatttaaaataatattaataatcataacagagcttttttgtaacattttataagcatactaccttgctgaagtagtcgatggaatataatcaaagattgtgtcaccaaatctttaaacaggacattttatcagagaagatactctggtttcttaggtaaagttatagggtagaaacacagtaagcagtctctggtaagaataatattttagccttgattgattatggttgccaaaatttaatggaattaaaaataacctgggaaaacatagattcctggtttctatcctcagtaggtctagggtaggtcccaggaacggtatatatttttaatagttacccacgagtcactgattcagataatccaataatctttctggagcatcagtatcccagagaaacaaatgttgccgttaataaacaatttgcagttatttcagtttattagctagctacgattgcattctgatttgctgtggaaagctggtcattactttttaagagcatatgatgctgatggaaacatgtagagctttaatcgctgtctcattaaaaggatgtagtttattctttgtgtttccttatttgttacagcttttccagaatgcacagaaccttatgtgcaattaaaataattaagaaaaagatattgttttctatttagcaaaggaactaaatctcatgctcccttatagtttctgttcaatatgcattctcttttgaaagtacaaatttgtaataatacaatttttgatctcgtctcccaagaagcctaactttatttatactctgactacacggtaaaatcacattgtcaaaataaaagcgttggtaatgctcacattctgccaaccaaccatatttgaagtcttttaaaaattcactttcaggtactttattctgtagactgttatttaataactaagaaagagagtttgaggaggacaaagtgagggcggaatgtttttattttccaagaggacatacatgcaaaggcataatcatataagagtatatacctatcttggttattttaattagaagtgcatgctgcttcagggagactccccactcctgactcaggaatgactgcgagtggaacccccgcctcagggaaaattactacatgggaaaatatgcttgggcctacatgagttttccagagttctcttgtaccttagctagtttgataatgctttgcattatgtatagcagttgtcagaaaccatttcctttaatcagttagcatccaaaaaaggaaggggtagcagatattttctgacatttgtagatataatgtattaaaaaaagcattaccttactcttatgacatagtgttgtcagagatttcccaaatacaacatgccctgcagattcttaaaactacacattttccttttgttaataagaaaataacagtaaagtatttattgtctattttgataccctgtcaacccaaacatgtattccaaattccagcctctgtttctttgtaaataattacaaaatgcaaatactatgattgttttaggaatgaaatgccatgttttgatgcaacaggagttgaaaaactgattttacaaatgtttccattgattagctgctatatgagggctaacagttgaaaatattttggaaaaatacaaaaacaggctttcatttctatttatagaaaaacagacatactttttttgcatgttcccacaagagaaatttacagtgtagataaagtacagcataggcttaacaaatatagaaaaatatgttattgactcttggtggaagtacatattcgtaaaggttttcttaaagttttttattctagttcaaagttaatacatatatgaatacacttcatgttctaaggatttatattattaaaatcactcataagcatagctttttatatgcaatttcagcattgattaaaagagtgaaaaatgggcattaacttagttgactactgataacaaaatggacatatagtggagtaatatataattgttaaaaagtaattatattgatctgtttctattgacatagaaagatcattaatatattttatattgtggaatattaacataatttgttgtttaatctctggacctagttagatatgtgaattatgtgaaaccttcttccaaggatatttaagttacattgaagtgaaaataggagttgtcaatgcatgtctttgttttgtggcgtatcttagtcttttaaaccagggaaaaacaactgggtcttgagtcagtgttagtcagtgaaaacattattcttgtttgtgagcatatgtgaatttgttatttttttgaaaaaaagtcaagttaaactgatatatcttgttatgaagaatatatattattatgaggaatatattcagttaacattggtatattttttaaaagtatgtttgagattatttgttaaaaagtaatccttaaggtcagttgtataagtcaatagaaatatccataggattgtaatgttaaagtgtgtagcacctatgtggcttgagtatttgtaagtttggaataagaaatatgttagtgaaataatagggacttttactgattatatggaatggaggaaatatttgtgtattacgttgtgtcatgagaagttcactaatttgtttttttaggatacattcgagcaattccatactcattcgtcattggttttagtcattgtattctgaaaaataattattttggtctttttatttaattataggcatagatttttctatactttttttcataatgattaatagttaaatcacatattttgggccatattcaatataaataagctaatacaattttcctgattgaggttatcacaccaggtttaaaatcagacatttggaaattcaaattctatttgttaagataaagcttctgtggtcagatttagtgggtagtactgagggcaattatcacattaaatttttagaaattctgaacagtgtggcaactattaagtttgatcctaatgagatatgctttatattttgggcaggtttttttttaaattatatctgtcatttttttcacatgttgattttgtaatttatcctacttgagtctgctaaaataggaaaaaaataggttaattatggagaagatcttataactattggttgtgagaatgatttctgtgtgagagggaaagttggaatagaggggcaaagaggtacaaaatgcagcagatttcaccaatgtatgaggtgctgtggaaatattttcttagttctgtgatcaattaacttcatacttatttttgtgttgtgcaataatgtcattagggatgcacagatgaatttgctaccattatttaagcagtgaacatcatattttaaatgttttaggcagaggtgccaccaacctcagcaagaagcttggtgatgttcagaagatatagaggttaaatatgaaaactatgattttggcccttagttactgtatcaaataaaataatactcatttaagtaagctttaggatcaaagtctataatcaggacattgtaacgggaataacagtattactgtgtgttgcatttcatttagcgttcacatttttgttgtgttagttctacattgacagattcgggttgggtcactgtaccattcttcctgaaaattgccaagatgatgagatttgatttttctaccatttagctcttgagcacataacagcattttaacttttgctgtagtctgtgttctgattccctatttactattttgaaatattaaatgatatggacagatcagatatgtctacctgaggctaacaagatgatgtctttgtgtaatatataggtaaataaaacactaattaggagtagtgctttctcttgtagaacaattaagtagcattcacagttttatctcattataccttcttgtagaaggaaatgttaaaatacttcctctttgaatagcatcagaaaaaatgcagtgtttcttttgctggaattgaagactggttctgtcagaatttcacagataattatttaaatattttaaatttgcatagccacataaatctgtttcgaatattccatggctcaaaatatctttcttcaacttcataatcaaggaggtatttaaatatgttgctattttaacttcatcgcctcatgttctctttccaatgagtgacgtttgatgctggtttcattcacttataaaggtgacatccccaatatactaaaccatatagcttaagcattgtaatttgtcgaaaatacaaactagtctgatatactaagaaaaatcttcagttataccacaaatattaattgttcgtttcctctgggccaggcattgttttggtgatctgtttctattaatggagaactagtgtaaccactgccttctctcatggagcttacatttttgtggcaaaggcaaatgataagcagatagcgagataagcgtgtaatattactctgctttcttcacagtactatgtagtattagatggggtttttttgtttgttttgttttttagacgaggtctcactctgttacctaggctagagtgtagtggcttagtcatagcttactgcagtcttgaactcctgggctcaagcagtactcccatttcagcctcccaagttgctgggaccacaagcacatgccatgccatcatgtgtggctaatttttaaaaatttgttttctgtagagatggggtctcactgtgttgctcaggctggaagtgtaatgttatgtacttctctcaaaacgagtctggactgctgttgggaggaacagaaggttgggtgctttggatggtggcctgaaaatcttctaagaagataactttgcagtagggacttggacgaaggcctattggggtatagagctagtatgcaaagtgcagtgattcattgtgataattatcttctagtgagcttaaaccttttacatttttaaaaattttgcctgatacaggaattaattcaaaattcacttttaaatcattgtctgtatagaagctttatgttctgttttgtcctaaatatgaatacttaaggatcaacaatcattttctaattggaatacagtttagttgccactggaattctaatctttggcagtagtgtgtcacctaaccgacactccttcattatccttcctacagtagaccactaggtgatttagggaaccaaactgttgaatggatcagaattctaaaagactgcttcgacagagcttagattacttatttgcgttagtaaacacaatcttcctttcttggcagcagctagtctgaaatgtggcagaccagcaggccacattggcagtctctatgccattccagaggatgtgtgattgaaagttatctttttctttgcagtattgttaaaacttagtcatttacatatctccttcatgattttcatttatgtgtagtctcttaggtatatttgtgtgtatatgtatctattctttaaatcttttttaaaaatttatttaattaatacttttttttttttcagacagggtcttactctgttgcccaggttggagtgcagtggtgtgatcatggcttactgcagccttgacatcctgtgctcaagcaatcctcctgcctcagcctcctgagtaattgggactacaggcatttgtcaccctgcctggctaatttttgtattttttgtagatatagggtcctactatgttgttcaggctggtctcgaacacctggcctcaagcagtcctccacttcagcctcccaaagtgttggattacaggcgtgagccacggtgcccggccctttaaatttgtaaattaaactttaatttcttcctaagttataatattgatgtaatcacagaccggacacactagttttagcattctaatccatctgttaaaattatgttgtttgtgcatcacctgaaattgccatgggtactgctggtagtgtgcttacccctcactgagaaatacttacctctgctttttgctatgtggagttgaatagtgctgaaggctgcattaactcgttcagatggcagttcttcccatataatgtataacatctttgttactctacttagcaccttagtgaatacagagatggctgtacagcctccagaaatgctaagttggttggttgtatatggaaatctctgttaatatttgggacaaaccctgggaataattgtgtgagcaaacttagtttactaaagaactgcattgctaattatggacttgttgacaccagtgagccaggggaagaagttgtggttttgggcaaggggttctttcttatcaactccaaacttacagggtgaagttagccatctctttcagttagattgaaactatcttaataaacaaaaatcataataaacgacctcaaaaaattacttagttaacttcctcagtatataacttatatcaacattaaaagcatattaaataaaattcttcaaaattaccagctaactactctgggatataactggactgattgcctatatttgctttagaagaacttttgcaatgattagtaaacatatgtgagcaagaaatttaaccttgctcatagaggccatccagttctccaaaagagaatttcattttcataccttgtaagcatctctttatcttctatagcagtaggtatgtgactcttaaataggcattcatatgaagccatatatatatatatgtaatttttaagaataattgttgaaagaataagaataatttcattcttctttatccttttctcggtttttattatctctgtcatttcaaattttatttctttcctttttattttctcccttatatttatcttaaagtagaatatatacatgatttctgatatcattcaaaaagaaattggttcttgtggcagaatattagtgttgtagatgatgtcagataaagcaagaaactatagcgtttggaatgtgatcagtaggttaaagagggactgctgttacctattattcagattttaaagtttgattctttttttttttttttttttttttgaggcagagtctcgctcggtcacccaggctggagtgcagtggtgtgatctcggctcactgcaagctctgcctcccaggttcacgccattctcctgcctcaccctcccgagtagctggggctacaggtgcccgccactatgcccagctaattttttgtattttttagtagagatggggtttcaccgtgttagccaggatgatcttgatctcctgacctcgtgatctgcctgcctcggcctcccaaagtgctgggattacaggcgtgagccaccgtgcccggccttaagtttgattcttacaatatttttgttgttcagagaagtttattataatgtattgaaatataggtcagatatttacctcagaagcaatgtacccattagtagaaatctttcctttaataattatttacagacaaaatttattttaggccaaatatgtttgcaagaattctcataatctggacattacccacatatctttaaacattatatctatctgtagaacaaaaccccattacttagttaatgttttgtgaattcagtattgatccaaattctataaaatcttaatttaccaaaagagatttctattttttgaaattctttttttaatatagagaaggaatataaaacaataatctgatatcagcagtttagtgaaattgatctataggatataatttgagtttgttacccacagtgccctatatcaagggcaggcacatacattatcaggtctagctagactaatgcataatggccagtatctattttaattgttcagtgtctatgcctgaactaattattaatactttgattatcatccttgtctatgtcctttacaattaaatggtacaaatctatgttgataatgctttcagtagcacttttgaagtaaatagaatttctctgctacagaaagtaaatataatcagaacactgatttgcaagcattttagtaatcaaagtatattttgtacttgagggattgtctgtaacctggcaaaaaggaaaaataatcaactctagaaattaatttttagttgtatttagatatgactaccaagcaatgcagatatttcttggggtaccagtcttcttacatatattgtctggatgccatagatcatgatattaaataatctatttcatcagtgttgggaccacatcctcccatacatgtttatttctgtaagtgtgaatgaagtttactcatttatcaaacattttaaaaaaagatctgttatgttccaagaactgtgtgatggaagacactggacctacaccctgttgtcagggcatatataacattgagggggagaggtacgaagagctacaaagtaccagaaacattctgagatggagtaatgtttagcatagttgacccagtcctatagagaaggtgatttttgaacagcaatttaaacaaggagaaggaatttgccaagttgcaggggtgaggaagtgtgtgtcaaaccaaacagggagttagcatgtaacaagtcccaggagctcacacatgtcttggcacctgccaagaaccctcagcaactcctctccaggggagatacaagaggtacagcactgagagaagcaacaagataaaatgtatcagtttgttaaaagggaaaggttcaagaaagagggagttgtaaatcatgttacaggtcaagtaaaggcaagaacaaaacatagtctttggacttggctttcctgacagcattgatgaactttgctgagcagtaaagtaatgggtgtgaaagtcagactgataaggattcagaagtgaatgggaaaggaagaagcagaaaaacagcacggtagatgactctttagatatttgcttgggaaggatggattaagtgcattagggagaggaggatgctagccagggcagggtcctcttcctcctgccatgtcaccgtctgcatgttggagtttcttcagcacatttggaagctaagagaaggaactgctgaaagacagggcgtgcatgtatagaggaggcagaaaaagaactagatcttgagaatgactgagtcaaggtggaggcttgtggaagcttaactgtgggcaggaggagggagaactgggagaccaagaaagatacagaaagataggttaaagacttgtgagtaggaaggtaagaaaaagttcatgcttaagggctactgttatggctatgaaatattcgtgacgcataatattattatccactattgctaatgaacatggagaaagagtaatgaagttttagaaaggctgccgtgtgcaatgagatagggagctgtccaaggacagggctagattgtgaggcagtgaaagggcctatgtgaccctggaacataataatttatagaggcaatgattgtgtgtgtgtgtgtgtgtgtgtgtgtgttttcaaatgtatgtttcagtgtgttcatgtgttgtattcatatatgtgttcatgtgtgtgtgtttgtatattttgtaccctagaagtaatccaaatcctgatgcagcagttgataatttagtttaccaatatttttggaactccatctattttgcatcattatgctaagccatggggttactgagatgaataatatattttttctgtccttaaaaacatatggtctagtgggtcagatatataaggaaataaaacactgtatagggcataggtgcagagataattcagagaaggcagtattacgatatggatggatagagatggggataatgacatcttggtagctttttggaggaagtaacatcttagctggctttagaggaagaaaatagttacatgtgaggcacttgaagattctgaagagaaggagtaaagacattgttgaccatgcaggtggtccattctcaaggcatgaaatcattgagtaattcttaatgcagaacaaagtttcaggaagatagacacagcttacagtttatgactggacctttggtttttttttttttttttttttatagaaactggcattaagacctaggaacttttttgaaaaccaaaatatttcttgaacactggggatgaggtttttttttttttttttttgatggagtctcacactgtcttccggcctggagtgcagtggcgcaatctcggctcactgcaacattcacctcccaggttctaagtgattccaggagaatcacccagcctcccaaggagctgggattacaggtgcctgccaccatgcccggctaattttttgtatttcagtatttttagagacagggttttgccatgttgaccaggttggtctcgaacacctgacctcgtgatctgcctgcctcggcctcccaaagtgctgggattacaggtatgagccactgtgcccagccatgggttttttaaattttttttagacagagtcttgctctgtcacccaagctggagtgcagtggtgcaatctcagctcactgcagcttccgcctcccgggttcaagtgattcttctgcctcagcctcctgagtagctgggattataggtgccaccaccacgcccagctaatttttgtatttttaatagatatggggttttaccatgttggccaggctggtcttgaactcctgaccttgtgatccacccacctcagcctcccaaagtgcggggattacaggcgtgatccaccaagcttgattgattttttaaatctctatcaaaagttgtagtcgtactgtagtattttccaaatagttttggaaagtagttttttaaacgaaatttagtgttaaaatggcaatattaatcttaaacaatttaagttctagatgttcgtgttttttaatgtacgtatgtatttatatcctatactctagtttccaaaaattataaatataccatatgccaatagagcaattttggctcatgaagaagtatcatcaaatactagttatcatactgtgtcattgcctctttaaaatgtgaaaattttactttttaaagccttgttttcctcattggcaacattcaaacaaaaaataaagaagaaaaatcctgatagaaaaagtaagttgttaaaagtaaaaatgccctgctctaagaagtagtcttgtggtgctgagttaactgatcatcaggcaacaggggatccctcatcccccaccctccagctttgtttggaattgtacttctgaagtgcatcacgctgctcaaatcaaattgctcacttaatatttaatgtttctgcgatggaatcactttctcccttgaggttgacttcagatttaccagacacactgacaacactgtactccttattttccccacatgacctcagcttctgctttaaaaatgtacgaataaaggatgcttttgttcatatcttgcctgcctgtgatatattgacaaagtgtctgcgggctcaatggaatagttttacagtatgagtgctgttttcagtggaggggcaggacttgggctttagaaggaagtgaattggataggtcaggagaatgtaccatttgtaaacacccctttccttttttattcacgtgtcaggacagcaggagcaggctgttcagtgcccgtccctgcgcagagccggagggaaagcagcttggaagtcagctgcaatttttaaaccttgctttttattccctggtaatgatcttcaagtgcttagacttgtctgagaagctgttttgaaactaacatggtttagtccactaactgcatgttgggtaaattcaaaacccacatgctcgtcctcttgcagtggaataagtcacatctgatggacattttctgtgcttatagcatagtaatgaacgtctgacaggcgcgacctttcataagacaacccacactattggctttctgcccagaatattgctgcaacactatctgtgattggttatctctctatcatgcattgcttcacaaggggaaacggcccctttttttaataaatctacgatggctggctgcaatatgcctcactgtaagtattttgtgtatgtatgtgtgggagagagagagagaggctgacttgaatattacttagtctggtatcacatggcaaggttgtgatactgtaggacatcagtgaagtgctacttagtaaatcttaacctatctcttttttctacaggttggtactaagaagtgcctttcctgacgtctctgctgcttggaaccgcttctagagcagtctctgcttttgccttgcttgctgccagctagactgtgacgacagcacatccaccctccacctctagcccagacacccccatttctacttataatcaagagaaaagctctaagtatctggcattgccctaggctgctttagtgttaaaagaaaagtttgctgaaaaagtaagatatcttctgccaggaaatcaaggaggaaaaaaaaaatcattttctcgattttgctctaaactgctgcatctgtctatgccaaactaatcaataccgattgcaccaccaaactccattgcaaattcagctgtgaggagattccctttcagacaactttgctgaaagcagcttggaaattcggtgtcgaagggtctgccacgttttcatgcttgcattttgggctccaaattggcactgggaaggggttactgagagcacaaggctgataccaggccctacttttaaacgttcatctacttacaatcctagtatttctctaaaaaccaaaacctctttgaattaacagtttcatgctgtgaatttctagtgggagatcttttccttgatattgacgacacaattttccatgtacttttaaagcagggagtggggaaaagtattttgaggggacattttcatcatcagttcagctttttttttttggttgttgctcttttttgggggggttgggtttgttggtttcactgaaacatttaactacctgtaaaatctaaacatggctgttagtgtcacaccaattcgggacacaaaatggctaacactggaagtatgtagagagttccagagggggacttgctcacggccagacacggaatgtaaatttgcacatccttcgaaaagctgccaagttgaaaatggacgagtaatcgcctgctttgattcattgaaagtgagtaactattatattcttttaaggatattcaatgattgaatgaggggtatatggacatacagttctctgcatatgggattatggattgctttgttcatagtttagttatacagtgtgttgatgatgttgggctggggaactttacgagaagcagtagaatcaagtctggccaaactttgttatgaataactttatcagtcctttcactgcatgtttttttttgctagggcagaaagtgttgacatatttttcacttagtaatggcaaagtgtctgtctgtccctggaaatggtaaatgtagctacctgtgagtgtttagcatatgcatatattatatataaggccatggcaatagctgaatgaggatgatttttatttgttggtaaaggcattgtacagttgcaaaagagaagcagatttaaaatcagctaaacttggatagactttttactcttttaatattttgacattttagattttctttttattttgtgggcattttattttcaggccagagccacgcattttatggaaaatgtaactagaagtaaggtgctgaactgctgctacagcaccttacctgaggcacaaactttgttgcatgtgagttatataaataagtagaaactcataagtactattgtttattggatttttccagcttcaaaaattctaatgtgaattagcagtttattttctgttagatcatgatttttttttatttgtaatagtcttagctagaaatgttaaaagttagcttttgtgggcaccataatactaaaatatttactttagtgtttcttgacattcaaaaatgtcattggatttgtaattcaggtatcatatttgaaaatgagtcttttaaaagataacataaatatctttattttgacacacaaggtcaagactagaaatgtgttcctgggtactttcagcctacttggtttaatcaaattgcttttgaatatgaatgtcctaatttaattctttggacctttgaggggaggacactatcacttctacatatgtagagaagtaaaagtctcatagatccatcttgtctttaaaaatatatggtgctataataatcttttctttaataacatcagggtgagttatgagttaattgtttcagttcattgtttcctggtccattttaggctgttcattttgctaaagtttttgccaaagatttcgagaatatgatctttagagttgaacagaaaggaggtattaacaacaaaaatattttaaaatgttagattcttcttaatgtcatagtcctaaagatcaataagcaaaagttataaactcccattgagactttcttcaccctttcctttgagaggcatcagtgaagggcacagtggttgtacctccgtgaatgtgtattcctaaattcatgctggctgaattcaggtgtaattagagactgagacccataaaatgaggggcaaggagctaattactcttgtcggtaaccagctgtggccataagtaaccctgttttgacccaattaatagtaaatccaatttttaatcctacagacagttgatggtgcactcgtagctgcaaaatgaaggacattaaatttggctgtgacattgagtggttacacagaagacctgcttctacaacatttggaaacattgtgaaacattactattcagttgctatttttccatctcaaaatatttttttttagttgctgctcacttatggccacagaacagtccctttttgagtaaagcagcaaggttgcttaatgacatgctatgtggttaacaagattcaactgccacatcaaggactttaaataatttcaagattttaaatgtatttatgaaatgaactcattacagcagctaatcaatgcaaactttgtcctttttctttgtctttctaagagaaactgaatttaatttaaatttaaattacagtgtctaaaacttggtaaaatattttaaatttgaataagaggaaaaaaaaaacatgaatttatttatgatggagcttcatacccaggacagtagcttcttaaatgttagtaaaataattatgttaagcattaaaacaattttgaatatgtaattaagcatttatgttaaaaaacatgtttcttacgtgtgtgtgtatatatttataactgacacatgtgattctttgtacagtatttagaatccttcccttcagatagcagtcctcttgtattcagtcttgtggctaaaatagatcaaaaacatattttaaaactgttaaagtaactgtatgactcatgcttgaagttctgaaatttgggagcgttatgaggtttccatgccattaaccgctagatcatttgcattctctcacagagtaaacggaaaaaaatttagaaaacttgtaataatcctgacttctttaataaaatgtgtcctgtgtattgcttaaatccatagtccagccttttctgagttcttgagccatgagatggaggtggcctgtgtaatctactatttttagaaagttaggaaagcaaaccaaatactctctgagaggaccctatgaaatggctgtacccttcagctgtgctgcttcagactttggccaggctcccaggtgacttacgttaatagcagacttctagttagaagaggagaatttatttcattaaaaaaaaaaaaaataagtcaaacagttcaagaaagtattcatttatgtaaaagaagtcaattggtatgttactaaagataataggaagaaaattagctcactattttagttgcatactgatgattttaaggtttaaataattagatttaaatataccgtatgtaaatgtagaagtctgtatcgtaataaatctgttgctaagtaaaatgggaatacatgacaacgaggaatgtaggtattaagaatgtcagaattagaacgagaacagtaaaagagcaaaagctgtaataatgtgtgctagtatataaacaatactctaaatacttagtttctctaattttccttttacaattgcagttttaatttataatagtctaagagcgtattcaagctgagacttaaattgcttacgtgctatagatttaggtgtattagctatttcagaaatccagaacatttgcaaaggtgcattattttatgccaaagaggattatgttcccctatggcttgtgaaagagataggaaaaaagaaaagaaaaatattaacactgcaagccaccattagaaaattatatttcaaaaatgatgtttcaaatcaatgacaaattgcctattcagtcatgagctctcaactaaaatttggggagtcaatgtaaagaaagcctacagaatgtattttaatatttgccaagttatttataccctcaaaaaaaaagcttttacgatatgatcaacagaaatagacttattgtttactgaattctatttcaaatacccattcatttttcaggtactagggatgggagaaagagaatataacctttatatttactatctattttccaaaaatctagcaaaattcttttacctttgaaaactttagtcacttgttcctttatcaaattgagccattttatttaagataattaaaatttctttttgctatatacagtgatatctatctataaatagcaccccgatcagatttatcatagacacatttgagatcagattccactgcaaagtggcatacaatcaagggtgctgagaacagttttaaagagcctctgcaggcttagcagaatatatgaagtatggaaattaggtattagaaggcacacaaatatatgtacatacaggtaaatgaacaactaaagcactcaaaatcagtaaggcaaacaagtatccagatggtcacatatggattggatggcataactagacatgataaagtagtcccaaaggtggttatagttaaattttagaagatcctctgttgctagcatggtttatcctcaatccagaaattgcctgtgttgctgctgttctaagccccaagcatagacttttcatcatattttaaaaaccagtttcactgataatcctgataaaatatctgcaagttttagactaaatatgcaattttcaattaaaattttgatctattagggtcctaactggaatcactgttaccaggaagtttttttgtggtttgatttttaaccactggtatctcccatgtattaaaactttgacagattattatatatactgtgctggcacatatattcaatgtgtctttcagtgacagattgacatatcacttccttgttttctcctaataacttaggagatgaactaactataaggcataacctgcgcagcagtatgtttcatataaaaggtccctaaggagaaacttcacaactttgtaaagaatatcctgtgaatatgctgcagtgtcatcaactctgacataaacctttctttaatgaaattctcaatagctgcagttgctttggtgaaactagtaattgtattcatttgcctgtttatattagaacttttttagaaaacttttttttatgagtaaaggtttttttagactattagataaattgtaaaccatgtttcgaatcaagctacctgctgcagtaattctagaactatttattttgcttcatattataagattttggtacactgcgtctactttttttctcatgaaatcttgcttcactgtgtgagtgtgacaaactaaaaacaatttagacctcaagcaatgtggcacttacagctgaattcagtttcattgtaattcagatgtctgaagctaatcaaaattccacggagtacccttgaaacaattgcatatataaggctgtttctcacttaaaagagacaatgcagtgtggggtgaattgtcttttgaagaactgtatgacacatgcccagttcaggtgaaaggtgagaaatggaatgtttctcagacctagcacagacacctagggacctagtttgggaagcttatcttgtcattttccttgccaaggataagtagaggatttcagctatcaacattgctaatccgttacctttcatgctgagcaatgtctctgccttcccacagacttagacaaagcttcttattttcttacaaagaggtcctattgaggaaatttgaattttttttttttttttaaacttagcagtactacatcctgtgcttttagataggtgagcaattttccatgttaacagctaggccaaaaatcatgactgccagtagaagtgggtaactagatagatagatagatggcctttgatttagcactgatgatagttattagcatgtagcaacttaagtaaaagcaactggaaaggcttgatagaaattctgagttgtttgaagtataatagattattaggatagtaatttctttgtgaattttactgtaaacaagcttgattctagtgaggacttatgctaattgctcacttatactaacagcaactacagagtttttatttaatactgtttcttatacaaatatcatcaaatgcacatctacctacagcatcatccctacatttttggcacatgtttgaaatattttcactttgagataaagtttgatttttttgctagcgataaaactttctatgctatgagcttgtgttttgaaaattactgataattactaaacagtataacccctgatatcttctaatttggttgacaggctgtttgtcctctggattcctgagggccttggccatctctgaccattacatttcttcttttgttatctctgagttctttccagctttctaattgtccatctttagaactattggttccgatcttaaatatgtctttccatagtcacacagaagtgatttagacattttgtctgtgaagaattagattcagctttgcataacagagacacctcccctaccctccccagcatttggtataaacaaattaggggtttatatttcagtcgtctaggtctatttggcgactctatagtcattggaactcaggttccttctctcttagttcctaaggagcacatggcttccaactttaggattatttcaaaattgcaatgtggccactgcagtgccagccatcatatccttagtctagcaggacgcagaaaaggcaagacaccataactcagcccagccaggctccttttaagcaaaggttctctgagcttcagccagtaatttttcagtctcttattgactgattttggtagcagggattgctaggaagtatttttttgtatgtttgtttgttttgttttgtttttatttattattattttaaaaaactgttgccttgattgaaatcaggagtctggtaggtaagacagaaggggagaatggaaatggatgttcaggagggccatttctggaataaaagagtgtttatttttcctctcataaaactttcagaattaagtaaatctctctggaaagcatctgggtaagggaggtggttgaagagataccacttttgaagagaaactgaagtcttctcatcttgacaaacttgtcatcacttctgtcttgcttatttagtaaataaaacctggcatatcacaaatggatttatttttccttatagagaaaactaaaacagcttcattttttatcttcttataactgtacttatttatttatttatttgagacagagtcttactctgttgtccaggcttgagtgcagtggtgtgatctcggctcattgtaaccttcgcctcccacgttcaagcaattctcctgcctcaacctcccgagtagctggtcctacaggcgtgtatcaccatgcccagctaatttttgcatttttagtagagacagggtttcaccgtgttggccaggctggcttgaactcttgacctcaggtgatcagcccgccttggccttccaaagtgctgggattacaggcgtgagtcaccgcgcccagcctactattcatatttatataaacagtcacatttttataactggaatatagcagaaatgccatgtcattaaaaacaggtcccaagtgattttatatgacaaaagaatctgcactttgatttgtatttctgctgcttccacaaatacactttcttattttttccgtatggagtaaaataacaaggtgagttaatatttattgaaacttaatgtatgtcaatcagtgttttcagtgcttttcatttttttcatagtattttgtccctataaaatctcatcgagatagttactggtgttacttccatttcacagatggacacactgaaatacagagaagttaggtaatacatgcaaggtcagtcagccagtaaaatgtggacttggagcctcgtaatctgatttcacagcctgtactcttaattgttttgttatgtttgctggaaaacattgcttcttaatttccatatgcatattctaaggattcgacaaagaaaatataactaacagcagtacttaagaataaaaatgaatatccaagacaaatttatagtacagggcctaaaacagtaagtactcagaagtaatcactgtattttaagtcaacaaatgagtcaaggagtgaacccaaaatagcagaaagaatgctgccaccaactttcaaagatgttgtatctgttgtaaaatatatggccatataggaaaaattttaaatgaatcatcttagataactagtcactgtataaactatatagctgcctccccagtgcataaaaagccatattcaaaaggtttaattgtttagaaaatgtttttccacagaagcaaggtgattaagtcatcgggtcaaccctgagaagccaaagtagcccagaggatgcttgagttatagttcagtacaaacagtaccttggaaaccctggttattaattaaacccaagaggctccatagaagtgttatcttatcataaatcttgagaactcctagagtcacagaccccagctgcttttgtcaaactatttctgtggcaaagatgtattttaaatttcagtttagggttccagaaattcagcttgcctagtgcaggggaggtggcctttcccaaagtcctggaactcatgctgtgagccagtgtagttttccccagctttaactttgggctgcttctgtttcctgaagctagtctttaatagggcatttgcttagaatcagcaggatctaaagacagggtatgcagtgaggagctggagtccaaagcttcccacctgtgtaacctttagggtgggaaggtgtcgtcaatatgtcttccaagtgacccccatgtttctaaggactcagcctgcctgttttttgaatgtagtgctcattgatcctgggccctgtctactgcagagcttaatgaacagcttctccccattcttccccctctctgaaattttcagctgtgtggttgttgctgttgttttctaaatactagtagccatggggaaacaggtagatcataaaagtatcaaactcaatttttgttttgttttgtttttttttttggcattttatcataggatatggtcaagagaccggttgtaaaaactcagatgtgaggaagaaaaccattaggaggtgataaggattcaacaatttaagtaatataacttatgtacttcctatgtcaaactttagggaggcagatgttaacaatacagtcctcaaggagccggttactaacagggagactagtatattaggtggtggcggcaatggttaggagggggaagtttctcgacagcaattgcagggtcagtgaaagagatacttgaggaagagagaaagaaatggctctggtggtttatctttcctttttccccttccctctctctcacactattaattatgacatcacaagtgggaataaaagaactagagggaatccccagtaaaagacttcacatagccacaggccaccagactgtggcagctgtccctgaatcatcatgggtcagttggtaacgacctgtattttaaccctagatcacaattttaggcccagcaaaattgttctgaagctgtctagatttattaagctatatttatattttagtttatgttaatatgaggttgagatccaagaccctgttttctccagacctcatatgagtacagtatcttaagttagaatttatctctctgcataaaaatcagacctagtgcgtaggcttctggatctcagaatcacttatacttaagtccaggctgttctcaaataaggcaagaagcatctgctgttaatagctgacagtaaattacacaaagtaaaacatggaaaattaaagtcagaaaagctaggaagcttttctatcattttcaattttctgcaaaaatacagacataatcagtgtttaggatctgcttgtgatggataaattacatctgtaattccttcttttccatattactgcattcagacgataatttgctttcagatatctttgctcatctaatcgttcatagactggaaataagtagtaacatctcccaatcctaggaagcatttataactagtctttgcctttttgggtgttgatagactagtggtgattataagctttcgagcttctgaaaagcacaacgaagattaaaataatcataggataataaaatactttaaaacccttctagtctttaattttaaaatgttccagtagaacacaaatttgctcaggtaacacacaagtaagcattaaatgccttcctgtgtatctgagaagtttgttatgaaatattttggaaaccgctgcatagtcagtgtaggaggagcagatgaattttagctgtggttatgtgtgctgtaaaagactatacgtgcttgtattagtcagaatgagtacaccactaatttttgtatggtaagagatttatactaagctcatcatcagtttctataattcagtgagataaaactgagtcagattgatttttaggtagcacatgtagaaacagctaattttattcccctgatttgatcctcatctattgattatataaactaaagaagctaagaacaattaacccttacgaggttacacagtcaggagatgctgaactgagattcagtgtagaaagtctgtcttcagagcctatgcttttagtctttatgctaagtttaacttgtttaaatagcaagattatgaagcactatacagtgacctcgtatagacaaaaatatagtatattgattattagagaaactacatattagactgttgtacatacgtgggcaagtatttgttaaatcatttcagttgcctaaatttaagcaactgtgctgtttaaaacatgctcattcacattttttcttaatctagaaagtcacttctgaataattgcttgtttagattttctcatttggtgtgggaaatttatattaaaattttaactaatattctaacaatacagagtctgaacctaaagtccagaagaattttaagtcatgccgcagacaggatgaacagtatagcaaatcagaataatagactgtttgggggggttggggggaacccatgagaatttcaggatttcaagataaagcttggaattgaggtaaaggcatcagataaggaagtgtttcatttcataactttttttttgcttgaaatataatatattttaaatcacaaaagtagtataactgttatttttctaatgcacagaaccatgagactttttttttttttttttttttttttgagacagagtcccactctgtcgctcaggctggagtgtggtggtgccatctcagcttactgcaacctccgcctcctgggttcaagcgattctcctgcctcagcctcctgagtagctgggattacaggcatgcaccaccatgcccagctaatttttgtatttttactagaggtggggtttcaccatgttggtcaggctggtatcaaactcctgacctcgtgatccgtctgccttggtctcccaaagtgctgggattacaggcgtgagccactgcgcccagctcaaggcattattttataagaggctgagattttattcatcttactaggcatttatttatattatattgtttccaatatatgcctagtaagacagaaatatgcttaaaaacctttgtaaatctttacaagttgtactatattaagttaaaatccagatgaaaccattcaccacctctttgacaatgattcatatatcttattgtatgtcatgcttgtttgtgattttgagtattacatttcagaaattttctaggactaaaatttcagtagtttattttaattttttgtttatttgtaataattatcaataatgctgaaatattttagatctagtaggtagaatttttttcatgtgaatacattaattttaatgatgtatttaaaaatagctcacactattctttttaagacttttgttatatgtaattggacaaaaatttgaccatgtaaatataagaatcgttgattctattttgttcatgatatggcataaagagcatgtttgctctcaaaaaacatgggtttgagaagatgaaatttctgggcatactgggtatttagtagctatcagattgtaatcctgaactcttaagagatgtatctcggatgggcgcggtggctcacgcctgtaatcccagcactttgggaggccgaggcgggcggatcacgaggtcaggagatcgagaccatcccggctaaaaacggtgaaaccccgtctctactaaaaatacaaaaaaattagccgggcgtagtggcgggcgcctgtagtcccagctacttgggaggctgaggcgggagaatggcgtgaacccgggaggcggagcttgcagtgagccgagatcccgccactgcactccagcctgggcgacagagcgagactccgtctcaaaaaaaaaaaaaaaaaaaaagagatgtatctcaaatattagaattgatcatgttatttaaaatactccatgggaaatataattatttttatggaacagttcatttggatgaatggtagcttgaacagaaactttcgataccaatagctagtgttataagtgtcctttcctgaaactcttgccacgcattgtgttttggcgattttcatggttgtacgaatttagtcagacagccaattagaaatatatttttagaaaattaaaaatgaatttatgtggattcaatgagatcagttgggtaaatcccttaattcagtgtcatgctcatgtaaatactccataaatggtagccattagtattgattgttcttatctgaatgccagagtttagtctaagttatctttcttcttatgggaggaactttgtcttaggtcagaataaagattgttatatagattcaaacttggtatgtaattcaaacttattttatgttcaagactaaattgatcatagggaaaagtgactggtgttccttgtcctttcatttcatttctctggacgctttcttcattggtttacattagctatagtgtaactttttattgtgttttggtattttctgagtgtctagattggcctgtatgctcttttctttgggatgaaatttgtaataaaaattattttgtagcaaataaatactggcgacaggaataatgacaatgtgactaccagtggttttcacttcattcccagtgtcacgtttagaattttcatcaaactaggatcttcagaataattgcaaaaagccacatgaaaaaatgtgcaagtgaaaacttttttttttttttgagacggagtctcgccctttcacccaggctggagtgcaatggcacgatctcggctcactgcaacctccacctcctgggttcaagcgattctcctgcctcagcctcctgagtagctggaattacaggcgtgcaccaccacacctggctgatttttttttatctttaatagagacagggtttcaccatgttggccaggctggtctcaaactcctgaccttgttgtctgcctgcctcggcctcccaaagtgctgggattacaggtgtgagccaccgcgcccggccaacattttattttttatggcaaagaatcaagactttgttaagagcctaaaccgtggattcagctggatctgagtttgataccatagtgacttcctagtgacattgtgccaatcactttactgtcccaagctggtttccttatctgtaaaacaagtctagtatcatttgctttcaagatttgtgaggattcaatgagatcagttagatataaatcatttaatgtagtgtcttactccatgtaaatactccatagatactaacggtagccgtttgtattgttcttatctgaatgacagagttcagtctaagttatctttctcttatgggagaaactttgccttaggtcatagtgaatgttatttgtcattatgcacattgcactacaggtctctgtgttgtttgaaaaaattaaaaaggacttaaccttgaatgtatataagtgtgcacatactagcttatttatttacctgttatcaagagaaaataaccccttaacctcttaacatatgtatgacttgactactagctaaaccagtaggtattaatggaataattcagaatttatattgtctgtacctgaaaattcattttgtaaatgcagttaagtatgaatggaaaaatggttgtagccatctgttagcaaatctaaattcatttaaaactaatcctatttagctttatgctggtctacaataaataattcatacttgatatttcaaatgctgtattatttatgtaaattttctcctaaaagactcacctaagacttttctagaaataaaattgtttattcagcaaagtacctgcacagattagaaggttaaatattaaagtttattttttcatgattgcactattcttttctatttttttatacctatataaacttaattggtcaaatatctaccactcacttcctcaaatgtgtaaagaagcatccaaatccataatactctgtttatcacagctttttttttttccccctttcactgtcactcagaatcgatagggatccaattctagcctgttgaaatggtccgttttgctccaagactttttttttttttttgaggtgggagtttagctcttgttgcccaggctggagtacaatagcgtgatcttggctcaccgcagcctccacctcccgggttgaagcgattctcctgcctcagcctcccaagtagctaggattacaggcatgtgctaccacgcccggctaattttgtatttttagtagagacagagtttctccttgttggtcaggctggtcttgaacttccaacctcaggcgatccgcctgtctcagcctcccaaagtgctgagattataggtgtgagccaccatgcctggcctagctccaaaattttaaaaagcatttgcctcatttatgagtttgagacttttaacatcattagaaataggagagcatgtactttttccagcaagtgtaaagggggaaacaaacaccaaaaccccatctccctgatttttttggcttttcagaaataatacagcctagtcctatggccagttctgggtttttcttgacagcgtctgtaactgttcttgttatagtctaattctgggtatgagttatgtgtttacagtttgatttactgagccatgccactgcattcttgttaaggttattgattattgcccattctgttctgctgtgtattattgatttagtgtgtgacaatgagttaattgtattacttgatgttgaagaaggatcaaatatctgttcaaaggggatgcttgtagcctgtgtaattgagttggctatttcaggcttttaacatgttgtgaaacaattaggagaaagtacaggaggacctctgagggcagggaacataaaatttgttttcagctttttcgcagttgccaaaaatggtgccgtaaggctttcctggaattaagtagtcagttggtatttggttagcagatgctttgtaaaacctaatatattcccactatatttcctttaaaaatcaagggggggttaacacctttagattgtcatgttttattgagaaaaatccacttctctgaaactccctattactggatataagaaaaaataacaagcaagatgtgttgtgtatgttggtgcccacattttggaggaaattacagagatagaaaattaagctaaattattaagaatctgatgagttctttttgcttactacagttttgtttcgtatttgataaaaaaatttccatgtaataacatttaagataaagccagtattattttctttgacattattttgcagtttgaattttctaagctttagacaattcacacttaatgtaaaaaaaaaaattaaccttcagaatgagatcatggtgccatggttctctaatgaatgttaccttttgttttagcagctcagttggctctaatccatggaaaagtttttatttcccatcagctccaaagtaggagccaaaccaaagtttaaagaaacgttttccagcagacaagtttctacagataatagtgaaagcgtgtgaacacacacacacacacacacactctctctctctctctctctcactcctctctctctcacacacatatgcgcgcgcacacacccacacgtcttatggaaatattaaatcaggaagaatttctgaagttctcataataaaaataactgtaatattaataaagtactccttatcagttatttctcgtcacattgtggccccaagggtttgcttgacttttcaaaatgtatttgcttcaggataaattgaagaagtaccactctctccctgtattaatacctttcagggcttttgatctgtaacctcttgtcacctctggtttatctggcttagcatatgaattttgaagaatgagggagcataaacaattatgactgccttttaaaaaatgcacgttaaacctgcggcctcaaacttgtcagttctgaactttaacagtagaaaagtgaaaactcagcgttgaaagtagagagtgtaagagattttgccagttggaccactttgctgcaaatacctattagacccaaacctttcttttgcctagtgatcagctatactaatagcaagatccacttaattccatgtgagtcaacagcttgcatggcatgcccactgtgtgcaaatagcttctcaggtacttttccaagcgtcctgcctgcacaaagcagaagagacttggaatatatttatttattctctcaccccactgcttgctctatcacctagaccttcatgctccatcacctagtcctgcttgctccatcacctagttggaatttctaaatcaacagacatgggcagatatatattttaaaagctgtgtgcctctgattaacaaccattcctttaatactgctgagaggttctgggaacatagtatttttgccatgacttctcaatctatagagaagatgtatttatctcctaaggataaaaccatctggaaattttcacatgctccagactttcagatagagctggctttgccttctctttttcttcctcctcttccttctttttcttcttttatttatttatttattttgctttgcttattaaaactatggatgaatttttaaaaagattaagaagataaaataaccttctcacctgcttagtaatttcttattcatagttagaaggtacagtaactgtttcataactgtccccattaaatttctgattcaaaaaatatatatttttctttataaataccgtttcctatgatttttggtccctaaaaagcaaacaaaaaaaagctacttgatggtaccttggttgtagttagcaggtctccattttctacagatcttccattctgctttattaacttcctttattaatgacaaatcagccagttgataaaataatgtgttaacttttaaaagattcttataaatttatgtggagttctgtgactacctgatatgactttgtgactattttagttgtataaagaatttcaaattatttattcctttaaaaaaatttttttttcagagacagtctcactgtcactcaggctggagtgcagtggcgcaatcttagctcactgcaacttccacttcctgggtttaagtgattctcccgcctcaatctcctgagtatctgggattacaggcatgcaccaccatgccgggctaatttttgtattttttgtatagatgaggtttcagcatgttacccaggctggccttgaaatcctgagctcaagcgatccacccaccttggcctctgaaagtgttgggattacaggcgtgagccaccgtgcctggcctattttttgttttatttttttaatcttgaaataactccacagttatctccaagtaagtctaatatcttctctttgaatttctaactgattcttatttataaacccatagaatctgtaaacccacaaacaaatgattcttcatcgatcaagttctgttttcaaatagatgttcaacgagatgttcaaaaagacgataaaggatacattgtaacctaaggactttatttcgttcatttggtcatttaccttttaattgtagtggacttaaatgtatacagattttcatgtacaacaagtagtatcctttagctgcaacaaatgaatagattagcctatgtgaatatagttttgcaaaatattaatgtatgaaagtagtcctaagactgcaagtactgttgctttagaacttcatgcataaattgggtgtgttgttacaggatacagagaaaattgatggtcaaccttagcctgtagtatattttgacagtgtgaatgagtcaagcaagcaattttccagactgtttaatggtacaaaggaaagggctgctaaggaagtcattcttatgactagctgaaaaatatttttcttagtgactgttctagagaaaaacaggtcaccgttggaagaaaaaagcagtctcacgttacaagcattttgaaagtggtttgatcattaaaatgtatttatcttacgacaaaacttaaaacggatactgcttactatatttgcaatgtcttgaaactcaacaagaaattatgtagcatcattacaagttttaattcatggtagaattttggagattatatttattgagctatgttttttatttcattagtacaaataaaactgcattttatttgttctaatgataaaatgttttaagtttataaaattactgcaaatgtattccactgtgtggttctaaactgcatttgaattaaaataggacttgattgatggagaatcatttgtttgtgggtttacagattctcttctaggtagtttgaaaagattcattgtccagcagcaactgttcacccagagacatagtgcttagcatgagcttgatggattcaaaccactgggtttatcattactacatagatctttgaaaagacaggctgcaaatcttgtttctaagctgtgactagctattattatgtcaatttgaagaacagaagtaaaatcaatccagattcaaaaaaagacactctacagtcattcacagactgcaaccagttcaaattgtaatatcctgcctatttaaagtcccctgattattatgattattcaatatcatgttaatatttaaaacttggaatacaacctactaaccttatttttatttgtactactggaagttcctctagcatttttgaagtagcttggaaaaaaattgagattcagttgtggttctacttacatttttactagagtaagttggagagacaaatcagtgagtagtcaagtcttcatataatcaaagcttttaaaatatgataacaaaaacttcaggtgttagatttagcttcacggaaaacctttttttggggggcctaagtttaaaatgtgttttttctttgcattttaaaagattgcttgtgcagtgttcaatggttttgtttagcatttagagatgattttttcctttgtcactttccacattgaactctgctgatttagtgtgttagaattgccgtcagaagagtccttagaaatgatgtcatgcagttcattagttttacagatagggaaccaaggagtggtgaggttagggtttaatcatatccataaagatcttgaggtcattaggaccctttaaatgtgactagttaaatcacagcaaaaactagaatatattgtcttcatttcaggaaaatggcatcattgacacacctgacagatgaaaactgctattaaggtcgagtccaagtgacaaaactttcttgactgttctgaggccttggttacggtggcattaaagttctatactgtttttttttttttttttttttttttttggctggacaacagactctccaaaaaaatgcatgtgtatacattatgcttattataaaatttactaataaaatgacatggaagacaattaaaattataataaaatatacaatgctcaacatttaaattctatatggccaattgattcttacagaatgcctttttgatttttgtccaactcttgcatctgtagtcaacctgtggtcgcaattgacagaagagtttaattctttctttgtgctcttactcctgggtccctcattgtacagtgatcatcaaatgcaacatccttcatgaaaatgaatagcttcactttttggcatttccttcctttttatgtgtcatagaatacactacattattcttgattttacagttaatttgtaaattgtttctaacccccactagtttataaactccttaagaatgagaagcttgcattaatcacttctatatatatagtgttttgaatatccttggcattcattaaatgtttagtgaattgaatgcgatgtttcttccagactatgaccaataattgtgagaagattttatgtgtttttaaattcaactttagagaatttctttttgtgtaataggacatttgttggacagcaacatgtaattactcataaaatgtttctctgcggagtccagcatccttcatttgtgataggactcatccagttaaattgctcaggcactataatggactatttatgttctgttgatgtaaatttctagaacaggcctttccctggactcatgccatgttttgtatgttatcttgtgcaggcagcacatggggacctagtcaggcttcctgatatgatagctgtatatacagcccatgtctcagaggggaatgataaattggcctgtgcagtgacacaatacacagttattttggtgacagtattaactctcttttcataagggtgctttgttggaaaactattcagcttaacacagaatatttagctttcaaaggttgcatagggagaaatgatactgccaggatagaaacattatcagttttttctttctttttttttttttttaatcttttttgactctaccgagaatattgaaaagagttttgattagtattggtgtttattacgagaggaacattctgggaaccagactattagtataattattattgtttttattatcaaactaatagcactaacaaggacatacggtatttgtcaagggattcctatatctctgttacacctaaatttctctatactctaattttagaaaaaaagttttgtcttccaactgtgaatactttatagtgttgcaacttctgcttctaatctttaatctgaagtagaaaagagaatccaagcttccaagaagtatgtctctagactctgccacttattaacttgctccttattttttctctccaacaattattttaagatctgtatgatataagctatttttagaagaactgaaaagttctagagagtaaaaaaatgttccagattgtgtgttggtgccagtagtactgacaattaaatatttgattgaggagaaacctacatttatccactttgaagaggatcatcaggggagttaaaaatttagtacttcaggctcattaagagttagaatagagtaattatgtagctggtaacaaatgctacaatcaccacttgagcattgtgatatgttactcattgagacttactggccttcttcagggaacttcagattttataaaagtcatttgcttagagagtaaagttctgctaatccattattttagttctgtcatctttttctgcaaatagggtgagttttccgagagggtaagtccctggtaataatcttaaaaatgatacaactttacagaatatctccccttgccatgaagcaatacttaatgtcttgaacagtgagcctcttgttcatgcagcatttaaaagagatgagtgtagaggtcttccttctacattcattttattcgttagtaattgagaagcaggtctaattttctaatcttgcaagttgggaaattattaaaatgctcaagagacagtagatcaagcctggtgtccctttctccatcaaattttaaaggatttttttttcctcagtaattctgcctttgtgtatttccaatcttgcttcctatttgcattgcacacagtggcatgtcaatttcaaaagaaaatgtattcagatctactttcaaactaactgaaagagatagtggtatttattttatcctgaggttttgttgttgttgttatggttgttctttgttttttaaatctggacatatcagtaatctcctaagagaatctattccaaacacagagactgtttattcttgttttagatactgttttaaaagccaggttatgttattatagtatagatattttaaaaaataatgaaaacagagttttttttaaccatatttttgtactgcataaaaatgcagtgacaagagaaaaacattagaactctgtcatactcctaatatagaccattgctgttaggtttctaactccatgttccctgtctggaagctttataaggccgtgccttagtcttcttaagcctaacacattgtagccttccaataaatattactttatttgtattaaatttaaaatggaatagaatgtggtacatcaccagcgttcatagctcctgacccatgccataactttccttgccccatccccaagattaaaaaaacacaaactattagactaattatagtcattacagttgtaaattaggtcatgcatttcattaaaaattgacgcagctccctttttgaaaggctatgtcacggaaatgcaaactagccttgtatatagaacactaaaatcatttaacttgaattattctaattacgataccacaaagattaaaaaatacatctatattatctcagtctgataactgggctgggaaaaaatgtcagttttgatatgtaacaagattggtatgagttattttacgtgacagttttattgattgatttttttcatttataatcactaattttgtgaggttttctcccctgcagcagtggactgaaaaagttaacatttttctggcattttttaagcgctaagagtagaaatcaatagttaaattgacctaataaaagatctgtgcatcctactactgtgacaagaagagcaacagaaagcaacatgtatagactcttaacaaggctcaaggcacattttggatttgttttgcatatgaatttaataagcatgagacagtgctagtgaattacatttgttttattgagtctatttaagccaggatactgttaagtaatagactgacggtttgtgggagccagattcagtaacaggtcagcaacagacttgccacatgccaaaaatggggttatactggtttcagtttgctaactgcctaagtaaacttgtgtagaatttgcattttttgctttgcaattactggttacttctctttaacattacatttgcattctatgtaaaaaatagattttatatttaattcaaaatttatccaaatgtacttactcattggacattatttttaaatgataaaggaacttaaaaaagtgataggatcaatatagtaataattctaactcccttttatacccatataaaattcatttaactagacttattcattcaacaatattgttaaataacctaaaggaatttttttaaagaaatagtgtaaacatacaaatatgaataatttgaactcccttttatataaatatatctgtagtcactaactgtaaataatttaaaaaatatatatgtacacacacgtgcgtgcacacacacacacacgtcatgccttaacaatggggatatattctgtgtgtcattagggtatttcattgttgtgtgtacatcatagagtatacttacacaaacctaaatggtatagcctactacacatctaggctgtatagtacggcctattgctcctaggctgcaaacgtatacagcctgttatcctattgaatactgtaggcagttgtaacataatgttatgtatttgtgtatcaaaacatactcaaacgtagaaaagatattgtgttgtgctatgaggttatgatgtctacaaatgtcactgggtggtaggaatttttcagctccattgtaatcttatgggaccaccatcatatatgtgggtcctttgttgactgaagcgttgttatacagctattgactatagttagtgaaaaaatctagttctatgattggttttgttccctcctttcttatgatcactattcattcaacaccttttatatgacatgcagtttgaaagcacagggtatgcaaaaattatccccgttttcggttgcagtatctgttgctgacccagataacttcatttccttcagctgtgctttcattttcaacttctctagttggaaataaatcctcttgtgttgccccttgagggagaaatcgtttagcaggaaatcacttactaatcacagttcattaatcacatataaagaatactttataaatgtcaactgtcattcatagaaaatgtatgttaccttgaggaatgtctatgaattacttattcattttcattgcctttcacacattatattccttaggagtttattaatttcaaatataaattgactatgacttatacagagtcttgcaaacaagagagatagcagttttgcaccttttctttgatttacttgttatcttcctggtcatgtagttagtctgttaaagtcactctgcctgtatagcttgttgaaggttacaggcagtggagtgctggaactggcttatgtcgagacctcttcccaattccatgttcaatgatgtctttgttgatagcttaaaattggctatggtgagagcgtttacactttggaaattggcagatggcaaccatagttctctcctagacaaccacttattaaacctttagcagcactcactgtttatagtgttctttttcgttttttaaaaatacttttattatgaggaatagccatgtagaattttatttccagatattttgttgtttaaaaccctaagaacatcactcactataccaattgccaactgagtaactgggaaagttacttagcttttctgtgcccaaatgtccttatctgtaagacggggatgataataatagcacgtaccttgggattgatgtgaggttgaataagaaacacatttatttcagtgaatacataatgacctggaatgaatactcaaataatgctacctgttatctctctgtactttaattaatagatatttattgatcccttactaagtacttagcattttgccatgtacagtgggtcatctactgagactcagtacctcccacatcaagttattagccacattgacctgtggcaaatgacttcttttgatgttcccatgtaatgccacatacccgcccccccccgcccgcttttttttcatttgtttttgtttgttttttggtctttctgcctgggactcttttttcttcctacatgagttttgcagaccttttccatgtttatatatggctcatacattccctcctctagaaagcttctcctcactctagacctggccacataactgttttgcctctttgcttatgtagtttggagtatgaatcataataattatgtatcttactccatctctgcatttgattccacagcctacgacttacacctttgtgttcttaacctcttagtaagaaatgcctgacacgtagtagactgactagaagtgtacattgaatgtttgctggttaaaggaatggaacatggacttcactcatagagaccttactatttggttgaagagataatgcatacacatgtgacatgaaggtaaacacaaaatatattgaagatatctgtattttattttttttagtttatagttaatttttacatactatatatttttgtagtaggtaagtcaattattttcatgctacagatatggacatttatgtatttatgtacaaatacattgatttaggttatctaggccagattgtaagtagcaaagccctgtttgtaaaccaggttttgtgacttcaggttagaaatattaaaaaaaaaaaaaaatccttaattgctcttccagatatgaactcattcttttttttttttcccctgtgatttctgtcttttttgtttgttaagtttaaaaaatttatggcaatttttaaatgtacataatattagagaaacaatataacaaccccctccatatatctatcagtcagcattttgtatgcatgtatccgtatgtgcatcagccaacattttgccctttttgttacctttcacactccttttacccctgtagcatgttaaaagaagtctcagacatcctatcatgtcacttatacttcttcagtagtatctctgacagttaagaacttattttaaatataactccatttccaaatctatgaaaattgacgacaattttattgtatcatttgatagccactttatgttcaacttttcctgattgtcacagcaatgtccttttttaataggtacgtttttccagttagcatctatggtgtcatttagcttgttcttccatcatccttattttctgtaaactgaaaattagagtcgagtttaactttaatgttatttattattatttggggggaacatttcctggaaggttctgtatactttctatttcatcatatcaagaggacataattttagtaatccctgcttttaatgatgctgcaatctatcagtgaatcagattggcctgggccaatccttataaagttctccatcagacttggatccaatgatttcacctcattgttgatcattttgtagccatgatattttttagagtttgcaaaaatggtgacttttaattatataatttctgctgcgtttattatcaagaatttttttcataaagatcttttcatagtaactaatggtcaacttcaaaatatagtttatatcagaaaaagggaaaaaatgcatgatatttatcaattttcagaatcagatattctcttctaacataagatctaaataagcttacacatataatcaaggatgccagtaaatttttctaaaaaatttttcccttggaaaaattatttatttatttatttatttatttatttatttatttatttatttatttattgagacagagtttcactattgtctcccaggctggagtgcagtggtgcaatcttggctcactgcaacgtctgcctcctgggttcaagtgattctcctggcttagcctcccgagtagctggaattacaggcatgcaccaccatgcccagctaatttttttgtgtgtatttttagtagagatggggtttcatcatattgaccaggctggtcttgaactcctgacctcaaatgatctgcctgccttggcctcccgaagtgctgggattacaggcgtgagccactgcgctcggctgataaattatttgaattgcttctcctaattttttttgattaatatgttttgataacattgttcctatggtaatattatcaaaaaagttttctttccttcctttttgtttatcattaatgtgcctctgtatggttgaatttatttactcagaagatatttattgggcatctgtctttttttatcaagctctgtgctagtccctgaggatgtagatatgagccctgcttttttcttttctttctttctttttttttatttgagacagactctcactctgtcactcaggctgagtgcagtggcatgatcttggctcactgcaaccgccgcctcctaggtttaagtgattctcctgcctcagcctcctaagtaggtgagataacaggcatgggccaccatacccagctaatttttgtatttttggtagagatggggtttcacccatgttggccaggctggtctcaaactcctggcctcaagtgatctgtctgccttggcctcccaaagtgctgggattataggcttaagccactgtgaccggctgcttttttcctagaatatatagtttgggtttcttttccactcgtgatgtgatttaaaaaattgaacctgttgtatatgaatgtggttttgtaaactataatatttggtatcatatactatatttttttctatatatatatatgctactatatagtcatatagtagcatttttttttatagctttctttggagttcttggtcttagtgtctaaaatagtggccataaaggaatttggaagttaagttgttcttgctgacccaaagaaaaatcagatgtttctgtttaggacactgtatgtgacaaacaaggaagtttttattaatttatttttttgaagaagaattgatgagagaataatgagaattcctccaagattaaaagtaaattataagatcctgtgctattttaatgtaagccaacatttgaatttaatttgacttctattttcagtaaattagagtgaaattttagggatgtctttatctcctatagtgtgtgttttgccaagatttattaagggtaattttggattttagaaaatgtacagtttctaaaggcttgtgaacgttttatattgatagaaaatgtaagtaagactagtaacacattattttctccaaaggatcctgtgactgacacaaaaaatatgatataatattgaatctgccaaaagatgcactgttaatctagggttatgttatgttgttattttattaggtatgtgatactatggtgtgaattttagaatataggtaattatttaagtaattactgtaattctaaacatcttctgagatgttttctctaaagcagaaactcagcttttactcatgtttagataatgtgatatagctgttctagatatttgagattagggttgaggcaaattgttgacatataattaaaatgtattttataactaaaatttagaagaatggaaaaagtttacattgtatttataagactttgctaacatgctttatgacattacggagaagtactaggaagaaggagatctttaaaaggagtgatattctgtttgctttgctggagtaccttatcaggaaatttgaaatcttagccctttaattgtgatatctgttaattctaaaacttacactgaatttaactttgaaggtcaacatatggatttttttaaaaacaatatttactctatcaaaagattagttgtatttttgacttgaggaaatagcttaatctgaacagcacgaaacttgacaaaaaagtttgctaatacataaatattggctattttaatctgttgaaaacggaaggctagtaccaagggagacggtagtaaaattatagaaggagctagtgaaaagtaaacattatgcaacatgaaaagaatactaggggaaaaactgacagagtagaataacaggaagattagtcacttctggaaggaaaaaagtaggtaggggcagggggatgaagtactttaaacaggaatgtggaactggaagtgctagggctaaaagacagatgtgagcttatttgggagctaaactgggctttgaaaaaggaataatactggtagcatttaatatcaaaatttaaattttatgttaacaataagaaaaaaatggagaaaaatttttgttagggattataaaatgcctgttaaaataaaaagacttatatttactcctttgtggagctgaattggtttcggtcagacagcaatgtcaaatgcaaatcaagaaaatacatttctgaggccaaggcaggagatttcttgaccccagaaatttgcaacaaccccaaggaacatagtgagactctgtctctaccaaaaagaaaagaaaaggaaaagaaaagaaaaaaaattagccaggcatggtggtgagcacctgtagtcacagctactcaggaggctgaggtgggaggattgcatgagcttgggaagtcaaggatgcagtgagccatgatcagccattgcactccagcctgggcaatgaaacaagaccctgtctcaagaaatatacatatatattttatcttatatatatatatcttatatattatatatatatataatatatatgtcatatataatatataatatatataagaaatatatatataatttctttcaaaaccggtcaaagttcttttactttcaagtgatggataaaataaaaccattgtggatatcatgggatatatgtgctattggtttgaaataattttcacttttgcatttatttatctgacaaaggagtaccaatctctaaatattttaaggattatttctatgaattctctaaaaaatataaattgtaactgtctatatcatacaaaaatatttagcaatccttataacagaaaacaagatagtaaacattgtgtgtatgttcatgtgtgtgtatgtgtgtttattggtagtctcattaatccctagtctctactgacgttattagggacattagtggaacagattttgctgaacacattttcagccactctgagtgttcttaggtattttatttatttagagactgaatctgtgttgtcctgcctggtctcaaacttctgggttcaagcgatccttctgccttactttcccaagtatctgggactacagatgcacaccactgcccagctaaaatgtactttaaataaagtagataattctggggttatctcaaactcctggcttcaagtgatcctcctgtctcagcctcccaaagtcctgggattactggcttgagccactatgcttgccacctctggggttatattagcatgacaccaggacaaaaatctgcccatttttatatcaggaaaaaaaatgctactttcatttaggtgcagaaaatggcttatgcctattgaaataaaaaattcagtctaatttagacacctaagattattatttgctataacgacatggaatacatcactgtgtgtcactgaattcatggaaatgcagtacagaatgcaatacagtaatccccccttatctgcaatttcactttctgcagtttcagttacccatggtacaacacgataagatattttgagacagagaaaccaagagagagaccatattcacataacttttattacagtataattgttctgttttattatagttattgttgttaatcacttactgtgcctaatttataaattaaactttattgtaggtatgtataggaaaaataatagtatatttaggggttgttactgtccatggtttcaggcatcctctgggggtcttggaatgtattccccatagataaggattatctactatatacagtcaggtaagccattcccattgattttattacaaattgcagtgcttccatggcttgcttacacataatttgctgaggtaacttttgcagaaagtaaccattttacgtgaacaccaaatactgattaaaaaaatctctttttctccttttccctctctttctctcccttctccctctctccttccctgtcttactccctcgttcctgctcttcttctcttttcatactcacacagacactccttcccctacacacacacacatacacacatacacacacacaccctgcccctgggcataactgaataggaaatgtttattttccaaactacagaaaaaaaccttatctcaaacactgaaagtccttccttttcctggtttggaaacactaagtcatactgagtcacttgtagattttctttagccagttttatttaaagcataaagttgtgaggacaaaatgactcaggaatttgtaatgtaccattagagcttttcacttttaggatgctagttcatattcagatgacttagtattaaagattgatgggttgtttactttctagaagaatctgaggagctcactgtaacttcacttattttgacctaagtatggcctagagtttatgcttattaattcatttatttctcggtaaagccatgtccaaggaattaaataaaaggaagcggacccagtaagggttgatgaataagaagctgttaccttactcatttacatgtattacttcaaatgttattgattgattgattgattgattgagatggagtttttgctctgttgcccagactggagtgcagtggcatgatctcagcaacctctgcctcctgagttcaagcgattcttcagtctcagcctcccaagtagctgggattacagcctccccactaccacacccagctaatttttgtatttttagtagagacagggtttcattatgttggccaggctggtcttgaactcttgacctcaagtgatccacccgcctcagcctcccaaagtgctgggattacaggtgtgagccaccgctcccggccttgatacctctttaaaaatgaagtttgttaaaatgatcagaaactttaatgcagctgattgcattgccattgacatcagtgagaaataaaaactatagctataatggttaagttgagcagttggaatctgtatgtctgtatctatctatgtttatttagatgactggataaaagagtcatgattcctcctagtctatcacgtggtaatgccaaggtcagaaaaatcatttgttatgatctatcttatgtaaaagcctgtggagttactttgttttcctcactcataagatgtcaaaatgtgctttctagaatttttgaataatttttgcttaaattcagtgttaaagttggagactgaaacaaatttaaatctgttgttagccaaagagtaaatcaagcttatgtgggtgcaatatataacatgactacccaagaaattctgcaaaaaaatgtagttgtctagcaattaggtacagagttgtcatcttccttctatgataacttttgattataaaaataattgaaggtaaataaactgtaaatgacacaccacctcaagctatgccacatgggcacctaaataagttctttttagtaaatgccaccaaatggctgtatttcttacagcttatggctaaattctgacagaggggaggtgccttcaccataagagtattttctctttgaagttttcatggttttgtgtgtgtgtgtgtgtgtgtgtgtgtgtgtgtgtgtgtgtgtgtgtgcgcgcgcgcatgcgcacacactagtttatattaggttagagtttaaaaaaagctgaagatagccaaaattagtccagagagttagacttgctgccaaactaaagaaatagcttggtttcagtattcttctggcttctcagtcttaacatttggggacctgagtgcttgatttgagctgactgaaattaacccagatggcccactttgggtcctcaagagctaattaaaggaagtcatttcagttgctgaataatcaaggccgtaccttcctccaatgttggtttcagcccacaccttacagatgatcgctggctttctgaagctctctctaaactcataattattgtttggaccctgcatgtaactaaattaatttgccaaggatgggaatgaaatgtaagttttattggcaacaatggtaatcccccaaaacagaatgacagatacagtgatggtaataatgttactgccctgttaatgcctccgaagataagatacacttgaaaaataatgtgaaaactgaatttgtccttgatttgaaaaatctgagaatcacataaaatgtttgttaatttcttaagctggtaaatatcattaagagaaatggacacatataagataagtttgtgtgcatatttgtacacagttaggtttttggaaaaagacagggatatcagatgctcctgccaccagggttctggccaaacacgacatttcctactcttgtttttgaagagttctaacacttcatcagttttcaagtgtcagtagagagtgggcataaaaccacaatttcaggagctgcattctctgggtccagatttcatctttgctacttattagttgtataacttttggcaacttaacattatatgcctcagatttatcagatataccctattaaatggcaatgtgtctaccttgttaggttattgtgactcttaaataagttaatacatgtaaagaacttgtggaatttcagggcacacaatgttaccttaccattgatattatttgctgttattaaatcttaattttatgtaaacattttaaaatgtctgtctcgttaacaataaatgtgcaatatacaaataaatgaaaatcaaaattagtggtggagttttaatgaaataatttagagctccagctctggaactgtataatcttcattcaaatcactgtgaccttgaagaagttatgtaacctaactaagcctcagtttccttgtttccaaaatgggagcagtactaatatctaatccttagaggagttgtgaaaattaaatgggataacacgtataaagcacagagaacagtgcttggcacttaatgagtctacagtgtgtgttagctattgttttattaattctgtcatgatgaagtgaacactgtgatgcaatacttttatacttagaatctgcctatatagggttttcagttttgctaatgaggagtgttattctctgctgtgtaaagaacacatgctttggtgtttataatttttctctaataggtaaatgattaggaaaagaataacctgttattttacttatcctttgttgagatatttaaattatacaaaaaaactgtagatggctttttatatctataggattttagctctggataaatcagttaggtaaatgcattattaatgttggaacctgcttaactctgttgtccagccacattgtagccactggttaagtcgaacgccactagaaagaaaagcaaataatcaaaaacatcaaaatggaaatgaaatatggagcaaggaagtcattacttctgtaaaataaaggtctgagacctaatattttcccattggttggaagtattgattatgaaaacattagaattttcagtaaaattgtttctgtgccaagatggcagatagaatattatgaaagaaatgaccaaaattgcatatgacatttattttatatggtaacattctttctttcattaacaggaaattttagggcaattatttgcttattgggaatgagaaggatgaatgaaaatttaaaaaggattcatcaagtcttccttataataaagtaaacttttaagagcatgtttttccatagaattagaaacttagaatttcatagtaacagtgtattcatcacctcgtttggggagcagattttcagtatgatcacaggaaaacacctgttttgacactctgaaaaaggtgcagacgtacgggcaaactctctgtaggtgtaaataagaatgctttggctagcatcctgcaaggagatgggtctaaatggtctgctccagcttctgctgctgctgctgctgctaatattgctgggaaggaaaagtggctgacctggcatatccattactcttggtgctgcagcagtcactcaggaaatgttgtttaaggggaaccttctggatccttttcatggcaccatggcaagaagaagctgtatcttatctatggaagataaagcatggagttggctaatggatgctggtgagtgaataaggcaattggggagccagtttgctaagataccatttgggtaggcctgctcgctcaaggcctgagatgacatccatgggaaatggcttttggtattctgtacattagaaactgttttagagaggaaccgtggttttcacattggtgatctgatctgtgattctgtatatgttccataaagttctcatttattctctgcttcactacttgaaatactaatattgaagtttgttcagtacttcagtagatggagcatagttttccatgtaacttcttagtcactaatctctactcttgtttttgacttgccctacagtgatttttaaaaataactctgtggtatatgaaagcagttgttcctcctttcaattctaattgagcaccttttttttttcacaacagtagattataggattttaaattatcttcccttttatgatttacatcagacacaaacatgtcaatagtttacttttgtccaattaaaaattggaagaaataagaattttaagttaatcatagagatgtaggtcaaattttcttagaattattattctgtggttaataggtatcccataaaaacggtaagagctatgtttgggaacttacagtggcatagtaaaggttctgccaagtcatgggggaacagacttgtttaacttcaacttttaacagattcatttgaccaaccccctctcctcaactcttcttttttcatgaagagtgcctttccacatgtggcactaccggacagtaagtgtttattgagcacctactatgttgctaggcaaactaggtgctggaaatataactgtgagcacattcatcaaaaatttttccccttgcgatgcttaacaacagttatgaaaacctttgtttagatgatctgatcttatgtaagatactttaataacaacataatttttattcaaaaatgtaatctgaagagcttcataagtgaataaacctacaatttctgattgacaatgtttatttacttctcttccacttttttgggggtttgtttcatttttgttgtttagattgttaaaaactggttttcaccaatgggattaagagcataggtgcagaatacaaactgcaattgatttttaattttttatttaaagtcaaattattacctttaaaaaaaggtcagcctccatttggattctgccatagaggcttacacaatctttctgcattcaaacctatcacattgacatgattatatttttaaaaaattaagtttagtttaagtcaaaatctaaccttaggcactgtctctaagatgaaaaagtatttttaaaggaaaatttagattcctcattctcttataaaatcccagttccctcaaatttaaaatactaactgcttaggcagtacttaacatgtcataaggtgggagttacttcattttataacaatgtctaactcttagtgacttatcagacagaagtaaaccttgcacaagctatttgatagcttttatttcctgtgtcacttagaatatatattttgcaggtgaggggagaaatcaattttcccaacacaggatagtttgaaccatttgtctcaaagtaaaatagactactgttactattttagttaccttagaactaaataccttggaatagaagaaattagatatccgaagtcaagaattacacacacataactgcttttaggcaatagcttttcttcttaactaattacaagtataaagtccatggttaatttgcttcgagtcttgaaaaattgagagttcctaaatgattttgaccattttcattttcatttcatacatattaggaattattaaagtcctgtcagagtttatactgaacctctgacttgattttatccagctcatcaaagcaaaattgtcttagtagcactcttttgtagctgtttaatatttaatattcagtgggctccttaaggtgagttcttgaaggcttgtgagtagttgaagagctgtgaatggtggttaacaagctattatcatctccttgaaaagcataacatgaagcagagattcaggaaaatcttagacagtgattagtctatctgacagtgcatcaaaactaaattagttggccaagcacggtggctcacgcctgtaatgccagtactttgagaggccaaggcaggtgggtcatttgaggtcaggagttcgagaacagcctggccagcatggtgaaggcctgtctactaaaaatacaaaaattagctgggtgtggttgtgcacgcctgtagtcccagctacttgggaggctgagccaggataattgctcaaacccgggaggtggaggttgcagtgagccaagattgcgccactacaatccagccttccagcctgggcaacagagtgagattccatctcaaaaaaaaaaaaaaaggaaaagaaacaccaactaactaaattagttatattttctgtccttcctcttctttatcctttttctttttccatcttttgttcttctcatctctgcactgcttatctacttgcttcttctttgtattcttctcttatctcattgaatttcttccgtctgcctcatctgatcataacagaaagtgataagtttgataaaatgtatattgtacttactaaaaacaattttaattatttatcaatttaaaaatcagttgtttaaccttctctctgtctttccgttttctcatctaattcccaataatgttgccttttaatttctgctgccttgcggatcagcaccctgggattttttttttgtatttgtaaattaaatattgcgatgacaagatataataattttatgtcacttattagatttttaaccataaatgccgtaggcatgctataatatgtattccttacttttctttctagaactaaatctccatacccacttcatccgtgtttttggcttatgtatgggatgctagaatggcctatctccatgtattttgttgcatttctccattgcttcttgtgttctggcgggaatcttggtgattcttttcaagcactacctgagctctgtgccaattgttcctcttctcccagggtgttgtgctgcgtggtcatgtctccacttccttagccctgtccattgacagaaccttgggttctgtgatggctgcctctaaacccttgtgaaagcggggaatattcctccccctgctgctacagttgagcaccgtgctgggtaccatgttgccctctacacttgctttcagttgttaaggcttcccaagctttggctgtggctcagtgatcctgctgtcaaaaccctgaaactttcctagcctggacactcagtggtagcagcaggtgttgggatttctccaagcccctaagactctgggaggaagagaatggctgtttgacatagacctcaggagttttcaaagcaccaagaaacctctccagaagatatgtaaaggtaagattctgatttctctaggaagccgttctagaagctaaaaacaaaaccctgtagctatggatttaatataagttagtagttaaagaatgtccttgggaaactctgtgtttgatcaaaccaaaatatgagtcttagggaactatttattaaaaactcttataggaattttgtgtgagattcacattagttttatttatattaaatttggcatggaacagatttttaaatattcaattttttttattcggactctgtgaagcactttttcacaatctgcattgtatatctagtaagagaaatcttgttgagaattaaaatggttaaagataaaatagaaattattttttcaaataccgatgttttatttgcctctgtgttaatatttaaaaccaaaaacatttaatgaatatatcttcaaattcttcaagctgaaattcttaaatccataattaattcaaaaggaattagaagagcagttcaaatcttagttggtagtgctagggatgcattactgtcctttgtcaaaagttactgcttagtattctaactatggtgatttcttgctttatttttagattttaaagggaaaaaaattaaaataaaaaaactttttgggaaaaaaattcactacatatggatataaataacctgaatggaggatacttgtggagaggtggtaagggtgtgtgtgtgtatgatgggtaggggagagagatcagcagcatcttaagttaacaatacaaaacacctcttcagtgttatgagtttgtgacagctgttattcagtgcccccttccttttcttttttttcccccgcctctattttcaggcagtaatctgtgaagtgatattaagacacctcttctaatatgagatcattgttggccttactgtcagtttaggtcttctttttttcgcccatttgttttcttttcaatattaacttaattccttaaatggtttccccttgttgaaattaacgctattagcttactaccacattggagccctttaatttcaatggccaaaaatgcaacttaatttttaaaaatgaaggaaaatgtttactcatagctgaacaaaatgaaaaatattgatctttgacagtgtttattaaggatgctttttatttttagtaaactttatttttattgatatttcatttaacataatttcagagtagctctgtgctgtaagatgagcaaaagaacagataccctaaatctcaaagagctttttctttcgtgtttttcttctgagtagggcatgaggtttcagattccccagtgttgacatctattattttctaccttgagattttacctatagacacagaaagaggagataaaaaggccaggcatggttgctcatccctgtaatctcagcaatttgggacgtcaagaccagaggattgcctgaggctgtaagaccagcctgggcaatatagcaagacattgtctcttcaaagataaagaaacgaacaacaacaacagtaaaaaactgggcatggtagcaggcacctgtagtcctagttactcaggagactgaggcagaagtattgcttgagcccaggaggtcgaggctgcaggcatcactgcaccccagcctgggcaatagagtgagaccttgtctcaaaaagaaaaaggggagataatatcaacatgcaaaaactgaacaatagtaatctcttgtggtgtatacttgccacctctgtaagattgtaatgacaatgactgagttttttcctgccaagttcagttccattttttttttaagtaaaatatcagactatgtgaatttatagacttatttctcagagtatattaaaaatagtggaagttgggagatttttaattcttcatgagtccaagctgagacatagctacaactgacaggatctgttcaccatacatacttccaagtttggaaactatcagcaggcacctgcaactaaacccacaagcgtaaatgttccagagtgttagaatcttattcgcataatacctagcaagatcccagatgtaaacgggagaactcaaatgttcctttggattccgtgatggctgagaagcatccaggcctgctaactcactgaagaagaatccagcagaaggggactggacagaacctacttttgcataaccactgatcccacctaaagcagccagtgctgcatagacaaagccaagccagtataaaggcacctgtgggccagggtccatctgcattgttctcttctaattctctccagacaggagactgcagcaggcctgcacctataccactttcctgaaggtctgggtaaattgatgaggggacacaaactgtacgatgcttattttttaaaatgaaaagatgtttaacaaagcattttattcatatatgaaaacattcaagtttattccctctagacttcaaagtataactaaatgaaatgttttgaagtgcattaaaatgggtaattctttcatatataaaaacagaaaagtgaaattttcatgcttttattaacacttatagtgagtttataattttttaaaatgtgtggcacagtctcaagctagtggttagcattatttgcaagtttgtctatagagtgcattttgtcttttctatttctagaactcttaaattcccttgggacaagaaatgaaacaaatataagaatgtaaattatgaattctctttcttggaagtttaattttaaaaaatagtttaagtacttttagagtgggaatttagaacacttaattcacaaacagtatgaagtacttaatcactgaaagtattagaagtgagtgttaattctcaaaataaggtctcaatcgcagtcataatttctataagaatttctgccatcactctgttcataagactagtactgctcaattcccattgtttcctctctcccttctgttctgttctgtttttggagagcatgggagctgtccataccggtaggcaatgaggagaatgtttataattgagattgagtaatgtcaaatataagccttttatgatacgattatttcctttgttgtaataaatttctcagcctcattaggcatatccatgtagaaaataaatttaaaaataaagtgtgtacagagcagctaaaagaggtggcaaatatagggatgagcccagatagtgacatttttggtactttaagggactgtttcacttcaaaaacaaaatattcctgtttattatttttaggtggaaataaaagctcactgaatcagaattattcaaaattaaaatggtgtctttagttaatggtagtaatgtatggattaccttttaccttcagtcccattacaatgattattttatttatttttcacaaaaacaccttgaggtgtagttagcattatttcacctatacaagtgaggaaactgataccaagagaaacttggcctcacagctggacacaggattcaaactcaggaagtgtggctccagagtccatccatccttagaggtccttgttagttgtaaatctggcagtgagtgccagttctcaaatcagtcctaacccttttcatagcctggtaccagcaaggggattctgtctgcacctccttccaactcaattttgggttgccattcacttgctggctatttgacctatcctctctcagcaataatcccaccctgtctaaaatatgaataatattgtctccttctcagggtttttatgaagatttaattttacgagacagagtatgccaagcacttagcacaatggctagcatatagaaaatagccaataaattattgatgttattatgtaatgtttccagggtcacacaactagaaaaagattgagtcagaattcaggcccaactctgtcttactgggaaactaaacaaaacacacacacacacacacacacacacacacacactttccacaaacaacaggacctacaaagcaaaactcgtgctctttctggattataacactacctctcaactctaaccataactttttagatgagtaaataaggatgtcatgtatgtgctgaagggataagtagcatagtttagtggcttagggcaaactttcaaattgaggtttccattgtgtgacagcaggcaagttaacccctctgaggttcgttaactacacatattaaactaaaaacagtatcagttgtattgcattatcatggataataaattttaatacaattaaagagctccaataaatgttggcttttagtaattgatatagatataaatgtttctttaaaaatatattcacaaaattgggatgcatagttagtgaaatcataaacatgtaaagtcttagagatggatataatcttagtagatgatcttccatttttgaacagtctgtatgctttctctgtcaaatccatttaacctctctgaaaggtcagtggagaaaggggaagaaggcatcagagatcaggactgacccaaatatggggtggttgtacctccagagatgtgggcaaattttctcagtcttggcttgatgtcagtgactagcattggaaaaccagatggtggaaataacccctgttaagcagatgatgggattatcaatcttgtgttctttctcttttgaagcagaacccaaaccaacggttgggactccagtcctgaagagagagagagttacctggactgagttgaatgccagagtttaaccttgaatgctagtcacagcagggacttcttgaattcttggagctcaagtgtctggcctgccttactagattctgaacaccttgaggttgaggatgtgtatcataatatttatttgcaactttagaacagtgtctgggaaatagtgggcacccaatgcatgtttgataattaaataagagcataagatccagaaacggtacagaagatcttgtttaaggatcccaagccatcaaaggggttagaaatcgaggctgcagtgcagaaagcataggatgtcctggggatgggggtgggtgccatggagctgagggtgcataacatttgtaatgacgggtttaggaactcagtaaactgaaactgtcagtgtagcctattcaataaatgtaggaataaagtattccaaattgtttaaaaaatgttgtaagcagatgacatatttaaagaattgaaagccattggaatccatttatattagtttttcatacagtgaaaaataatatttctggcactagaaactcaatttggtaccagagacttgaggaaaaatgtatttataaatgtgtcattgatatattcccttataaataagttattaaatagggttttatgtttataatattataaaattgtaatttgtatgtatgaacgttaagaacttacatggatgatgggggaagtaagagtggaagtgtaaaagatgacattttttggggggtgactggtataactttgaggtttgttttttaactataattttactacttgtttgatatatgtttcccagaaatatggtgaaaacatctttcagtcagaatctaagttaaaaaacataaaacatagtaaaaagaacaaagagaattaactatgtttggtctattgagacaacaaaagaaaacacaaagcacaaactcatactttttttcggactataacactacctctcagccctaactgtgccttctctgataaatcaggatgccgtgtgtactaatgggagatgtagcaaagtttagtggttgccacaaaggtgattttaggtagtcctaacaggtattgcagtgatttggcgtggtatatcaaaagccagagacactggtaccttgtattaaaaccctggatattgtgtgctggcacctgaaggaaggttgtttagaaaacttaaactgagagtaaaactcaaaccaagtgtttccgtgaacatttgtgtcttcttaatttgaaaaaggccatgtattaaaccagtgctcctgtcagtgtggaactttctggtttctcaagaagagtctcttaaattaagcactaagttaatattacacatttaaacattttcgctttcgaaaacatacattgttgtgaaagtaaaatattaaatgtagagagaaattatcacttacacgtgtaccttattttgtagactatagagtccatttgtgctattattattttcagatgtgcctgtaaagtggcttcttttgctgttcttttcttcctgctctctctgtatacacaaatgtccatacagatggaaaggcacacaaagacacacagacacccatgcttttgcttttactgtaaaagagtcatactagagtagaaattacgtgacattaattctctgtaattctctatttctttcctttcatggctatgtatgcctgaattgtatgtaggtctagcataccatttgggcatgaaaacgttgttttacttcacttaccctgggagacttttttttttcctaaattcctaatgcctgtttttaatttattttggcaattcactgtgggagttttaattaggtagtatgtttgggttactattgaagcagtatgtattaactaccaaaagttaaactcatcgtaaaaccctttacacatgaaataacttagataccttgagtaccagcttttcttttccctgcccttatcctggatgtgtccttggcagtttaatctgctttattttactcctttaaaagcgtaagatggaatggctcaaataaaatcagtgggatctctccctgaggagaattttgtcatcagaaataaaagtgacaacaccaagaggggaagtgttataaataaagtgagtagtgtttggtaatcatcaccattcttgatttcctatgtggaaataggactttgatatatgcattttttaaagcatcttgcaatttaaaaaattacacatggaacaagccaaataaatatttttaaaatactgtttttatttagagagagagacagctgtataaactgctctgtgtatgtgtaaaacattgataatacattagacataatttgcagaaactactaattttcacatcatttccaagtagaactgcaaaggtacagtactggtttagctttatggttaaaagcattggctctagagccagataacacaggctcaaaccctagttctgccgtttactggttgtgttaccttgggtaggttacttgacctttttgagcttcagatttctaatctttatttaatgagttttaataatagaataataggattgctttgaggatcaaataagttaataaaccacttagaacagtgttcaataggctggatttttgtttgtttgtttgtttgttgctattctttttgtgttatgttttgtatccagcagaagtggttatttagcttcctattttatgaggtaggactgatgggaattgacagtcttaggaaaaagtacaactgtaagtcagtggaagtttttcctagtcaagatgtcaaatgccagaggtcggattcatgtggcaggatggggtccaaactgtacaaaagcttggagatgaatgaggtgagacagctaagcttaagacaaaaaacaatgtgaagttatgtccttgggcagtgtttgcagtagtatagtgccgctttggaaaacttagaagatgatcctcaactgtgtccactcaaaatagattgtgcatctcaatgtcatagagtcagaaatttctaccactatctgtttaaatcatcgtttatttatattccttaaatattcatacctttcacataagtgagatacattatttttaaaaacgcagttttccttcttgattttttcatattgtcccattattctgagaagagtttattttatgagaattaagttattatcttacagaataaatctgattactgactagatacaagataaccacatatttttcctagaataatttaattccaattttacttatttgtaccttatatgacttattttcaggttagaaaaatgtggtcctacagttttgttttgaagtttgcctgggccatgtgaagccaccattatcatttacgtcaaaaatgaaggttatctgttgcccaagagaaaaatacagcattctcaatttaaaacactaaaatagtgagggtttcataagctgtttcagtgatttctgaccttgggttggaaagctctcatgtctcagttacctcagtgggtatagtgacattgtcccagtctgcattaccaaattgtttcaaatcactttaattaaaaaaaaaaaaaaaaaccagtcatggtgactcacgcttgtaattccagcactttgggaggctgcagtgggaggatcgcttgagtccagaaggtggagacaagcctgggcaacatagtaagaccctgtctctacaaaaatttttttaaaaataagaataaattatctatattgtaatttcaaagtttaggattgagagattgagctcatgctttttagtgtaattataattttggagctatgctgacatatttgtaaacaaacgcttagtgaaaactcatataacaatagaacagccaactatactgtattaagattgctacatgagaagagttccctttaaaaaggaaatttcaactcagaggaaagtttgatttgtgttcattagagaaccaaaaatatttaaaaatattttccatgagttgaaaagtaacatgaaaaaaatggattattttaaaagcattaattgacactttaaaaaaatatatttttatagaacctcaaattgagttaaaattatacttttagtcacttttaggttatagttttcatatcaaatgtattttaaatttaggttttatgtcttttaagtcttcaaataggccattttctgcctattgctcaaatatgtcgacctttatagcatcaggtcagtttacactgaaagctttcaatgtgtttggcatttttaatggaagtcaggagctttacaacaaagaacacagaaaatcatgtaagaagacagtgtgaaaaagcactggacttggagtcagttatttggcttcctatgacaggtccccatttgatcaccatgttactctgtgcgtgtcatgttttctcggaagcatacctgccgccatcttgactccttggttgaacaaatctaataaagataatgcacagcacagtactttttgtaaactgatactcatctctgtgaaataattcatttatctgaaaagcaatataaatgcatgtttaaaaatatactgtgaaagtcaatatttttatgaattctgctcatgaatcccacaactgtatgttgttctcatgaacagtaaaattgaaaatgtaattattgtttttataaggataattggtagtataaattttaatctatttagaataacaggtgggtgaaaagaatacagacttttcctccaggatgagtcatagattttaaaaattaagatgatatttaccatttagtctacagttttgagaatgatagttctattgcttgaaagagttagataccttccaaaagagaaaaggaatgtaatgggaggagagataggcaacagaaaacaagcatctgtcccttatggagaaaaatgtatttttaacagatactagagaatatagaagttgctatatcaacaaaaaatttttatttgctcaaacaggtggataagccaatgtgtatttactgaataaatgagtatgtgctagtggaaatcaatgagtgagtgaataagtgaacaagtaaatggataaactcagtaggtaacacattattcttcctgtttattatttttaggaaacaatacttatttgaaagtattacaaagaattcacttaaagaaccctggtgaaattcctcattttctcttgtggtaataggcagttgttatagtacagtcataatcttttggttgtaatttattatgtaggttgaattactctacatttacagagcttttgggaatcaggagatgagaaaacacaaataataagcaaaagggcagttagtactatcctaaaaataaacattggcccatgtaatcacatcctaaataaaataaactgaagtgggttaagaaaattatagcggtttagaagaatttagtgtgttttctagccccattttcatttgattttgatagtaatgattattaaaggaagacagagtactttgtacttttaacatttagccggcagcagcaattgcagcaatatccaaagtgtattgaatgtctttggtgtagaaaaaggcactggacttgatatgatcatagaaggtttttaagtgcttgagaaaaaggttggggaagcaggtgaaatatgagattagggcttgttggaagtcttaggacattacagagagcataataagtcttactgcctcctgggaacagaatgcatggttacaaaaataaactgaggtggaatttgaagagaagggaagaactttggctgacagggaagcaagatcaggttagcaaaaattctggctatcaagacctctcctggggcccattccctaagaatgtatcccttgtgctaaatagagtatgtatgtacaggcacactgtacatgtttgaaatacttgaataacagttcttcagggattactgtgtaattatttgtatctattgcctttatcttagtgctgatttatggggctagattttgacttaagttacctacaatgtcttgtttcatagtttgagaaagtacataaacaatattgaaaaaactaaacatcagtggtgttatttagtgaatagaacagttggaaacatatcttatttttaaaagaatagctgaatgtgacatatccatggcatgttaaaaaatgaaaaaaaatggaaactgactttgaacagattattgaaatgctagtgtataatttttctgagttgcactataaaaaatttttactcttgcaactagaggaaatcactcaactggaagtgctggatataatttctgacttatccattagtcatcctaataataagaaagtatttagttcctttttttcatagcggtccatcttaaacaataaaattacatagcccactcaaagatatttcaggaaaattgaggtgttgctttcaaaaaagtattaaaaagtgggcacagtaaattgtctgtgtgtgtgtgtgtatgtgtgtattttaatgctactgtttttatcattcatttctcatcatgtagataggaaggttagcagaaaattaccttgagatttatagttgggatgactaggcctggagcattgccctttgctaagataagaaatataggtgttaaaattgatgttttctctttctttttagggagaacatgtaattggtttgggagggttgaatttaaggaaaaacatctgaaaccctcttacacagactgatagtgctgtgataggaagaaaatacccagagagaatgtacagtaagaagaaggaatctaaagacaaaccttggcgcatctctctataaccagcagtcagaaaggagggaaatcaaaagaaagtgtcagagaatgagtaggttaatacatagcaggtaaatgaggatggtgctttgccaaggcaaaagagaaaaacattcagaaagtaactagttattctatagagaagacaagaaatgagaaaaaaatcactttggctgttaaaaggacagtagtaatctttgaaagcagatgagtagaattgggagagaggaggtagaattcagattgtaaaccagattccaagaagatgagtcactagtaaattgggaggtaatgcatgaggcctcaacacatgtagacaactctataaagaaattcaataataataagagaagtgggagtcagctgaaggattcagcacagaagaggttgttgtagagcagtgagggttattccactgcagaatagtggaagcatgtctttttcactaagggaaggggcagccgtcagtggagagtgaaagaatgaatgacaaatcgctaaaatagggaaatatcagagaagatgagaagggattaagaaaaagtgagttagagagattggccttgaatggaagattaaccaaaaacttcctgagagacagaaatgaaggtgcttagccagattccattccctaatactacctgcattttggtcatccttgtcatttgggtggttccatgccttgggtccacactcctttctttactctttttaaaaatattttattttaactttgacttatagacccatctcgatagaatttcatgagggcagaggacatgttttatccatgcatgtgttctaatgtgtttcggtaacccccgaagtcagtgctcttaggggaagaagtttcatagccctgcctatcgatcatagtacaaggctgatgactaattagctacctaggtgaacctcaaaagctgtttccaaaacaagtcctcaatttctaatgaatggggcagattattatgtatcagacttttttttttcctgtttttggttaataaagttactgcataacaaaacataacttagagttcagaagtggatatatccaaagccagatagaagttgtaactataattcattgtaataagtagaaacatttaactgaaaaaaatgaaaagacaaaaatttgcaaggcaaatagttgttaaatgccatggtttataccactatgtcaaacaaatgagatttcattatgtcattatattttgtctgatccataccataagcacaaatcccttgattagaatagttggattgcattttctgattcttacatagcaaaaataactctaagcaaaagttaactaaatgttgtctgcctctcatgtagaaaacatgttttatgttagtgtttgttttatggttgctattttttctgtaagttattagttttcgagttttattaaaggtgtaatttcacagttggagtatatttgtcaaatcctgaccctttttacttgtacatatatggtacaacaattttttaaacacctttttatgtgtaaacacttataggaggggttttaaggtagtgggcttgaagtcagactgctagtgtgttgaattctggcctcaggaatcactagctatgcaatcagatacaagttactataagctgtagttgtgtcatctgtaacactgggttacttaaaattctttgctgaagtgacttttaagatatttaaatgaagtgaaacacaaaaagcatgcaaacagggtctagcacatgataaagccttattaaatgttagctactattattatattttcagattatattttggagattcaaaagtacttagtaaatgtccagcattgctctaagcatatacttggtctctactaatccactttatttatttttttcacaaatgatcgataatctatttttcaaagtacagttagacatagaaacattatgaactgtctaccatttttatggctttagactcaacattatatttgaagtgaaaaattgtagctattttaattcctaaattatgtaaagctataaaatgtgttatgttagccagttgattttattcctcctgaaaatactttgttttatttctcttcagaaggaaaaatagaaagataagacagtaaatttaggatgagcaaaatatggccgatgacagctttcatgtattcattttttcatgttttaaaaattattactatcactaatcacttaaaacactggttgattatgactgttgtacagttgcacagacatcttgttttcttctagagagtcccaggaaagcatgagaacatcatttaactacactagaattgtaaattaaaacaattttatcctggctcacgtctctagggctgccttgaaccactctttagtgtagactctcctgtccaacctccctggagtttttaaaacacatcgccctgtctcacatttctgtcttcacacaattttcttttcataaaaattttcccaccctggtttttttttgctgttgttgtttttttttggttgttgttgtttttaaacttacgactcatccttttagactcaataccggagacagctcctctggggagtctcccttgatcccctccatttcctaagctgtgggaaatgtctccgttagtaacccacatcagttcctgttgcagtcatttactgacctgagtcctctgggatgcagcagagacacatcatttgccctgcatgtactgtggctaacactgttgtgtcagtgctcacttagtgttggttgaatgactgcatgcaagaatagctgttttaatttggacattaggctaagttttatcctttttagggaggtgcatggatgtaaacttcttggattatgtagtacgttatgaaatgaacttgtttaagtctattttatgatgaatagtttacaaacatagaaacaacacttgtagtaaactctcttaaaattaaatccagacagatttaaactatgtgtgtcagatataattttttgtcttttatatgagagtacaaaagtcagagtactctgtgatcagcgaacaaaaacacacctcagtctcagaagcttatcctagcaaaggtgtctttctttctcctgtaaagtcaatggtgtactctttcatccaactactcaggaatccaagcttactctgccttcctctgatgtgtggcttccaaagtgtctgaggctgtgtcagagagagatgggaaaagaacattggtttccaataatctcttctgggaaatcaaaccaccatttacgcttagtgtcttttggctagaataatgtgccaccaacttaatgcaacagaggctgaaaaggttgccttttagagtagtcaggcagaggaaatagtgcgtaggaattgaccaagccactaggtgatttgtctccttttttgtgtttctatttttgatttatttaatttttttgtgatacttgagggcctggatgaatgatgtgaggtagataccactgggtaaattcaagtataaaacataaattctatactaattatcaagcccttgtcatatcttaggcatattaattattgaagaagagtctatctcaacaaatccttttttttttttttttttggcttatagtccattttgaaaatgtggtagacattttaaaacatagtgcacatcagcatgtaacctcaaaatctggcatgcaaattcagaggttcacaaaatctctgcagcccacccactgtagccttcccagagttaagagcacctggcctgtgctacatggattggtgaaatattagaaaagatgagagaaaatcagtatgagcataaattttatcttctttttggtgagtactttgaaagaaaattaggacctaatcccctagtttaagtgaaagaggtaatttggttgctacatgatagagattcattgaaggagaaagaagtagacagtagacaaagttgttgttcaaagtataatcaagagtcaggcatccaattgaggtctgaacaatagcttttattcatgttctctcaccagtctgtgttacatgaagctttaatgatatttgatgattgaattcattttttaaaatagctgcattgcagaaaagtggtttgctattaaaatattacgtaccttaggagactgaggtggaaggattacttgagcccaggagtttaagacaagcctgggcaacatagcaagaccctgtctctaaaaataataataataataactgagcatggtggcttccgcctgtggtccctgctacgtgggaggctgaggcagaaggatcacttgatgccatgaggtggaggctgccgtgaggcgtggtggtgccatggccctccagcctgggtaacaaagcaaaacctgcctcttaaaaaagaaaaaattacgtacttgagtttggatcatacagattaatgaaagaactacaaaagatttttactgcttaattctgtatttggggtctcttcatttttaaaaataataaagcaatttgcttt

SEQ ID NO: 293 - DNA, 5940 bp, Homo sapiens
cttgccggcttccttgcaaagcccggtgcaagggcctctttcaaaatgaacccactggtgtgcctagcagtcggtagaagaagcgggagggcgtccggtctgcacgcccgccgcgaggttacaatgctgaacgcatgagatggaagataccaacgggaggccgaggggatccacggcgcccgcgcgggctccggcttcctcctgctctcggcgccgctgggcgaccgcccatgacccgctcttgcgggctctgtccggttgacaggcgaccctgtggcccggggaagcgcgggagggcgccggcggaaagttgaagagcgtttttctcgccgccgcgtgcattaggagctcgacgagtccgccctgggcttcctggtggggctgggcgggcgggggaggggccgcgcagcagcagcggaagccagacctcggcgataagaggctgcacagcgacatgcaacagtcttttcactgcagctgaatgagttgtggcgcccacaatgctcccatgacaaggagctgacaagttccattttccgtcgcgggcatcttggaatcatgactcccacaatgccttgggcacttggtcgacagtggggccgcctctgaaaaaaaaaatgtgagaggttggtactaagaagtgcctttcctgacgtctctgctgcttggaaccgcttctagagcagtctctgcttttgccttgcttgctgccagctagactgtgacgacagcacatccaccctccacctctagcccagacacccccatttctacttataatcaagagaaaagctctaagtatctggcattgccctaggctgctttagtgttaaaagaaaagtttgctgaaaaagtaagatatcttctgccaggaaatcaaggaggaaaaaaaaaatcattttctcgattttgctctaaactgctgcatctgtctatgccaaactaatcaataccgattgcaccaccaaactccattgcaaattcagctgtgaggagattccctttcagacaactttgctgaaagcagcttggaaattcggtgtcgaagggtctgccacgttttcatgcttgcattttgggctccaaattggcactgggaaggggttactgagagcacaaggctgataccaggccctacttttaaacgttcatctacttacaatcctagtatttctctaaaaaccaaaacctctttgaattaacagtttcatgctgtgaatttctagtgggagatcttttccttgatattgacgacacaattttccatgtacttttaaagcagggagtggggaaaagtattttgaggggacattttcatcatcagttcagcttttttttttggttgttgctcttttttgggggggttgggtttgttggtttcactgaaacatttaactacctgtaaaatctaaacatggctgttagtgtcacaccaattcgggacacaaaatggctaacactggaagtatgtagagagttccagagggggacttgctcacggccagacacggaatgtaaatttgcacatccttcgaaaagctgccaagttgaaaatggacgagtaatcgcctgctttgattcattgaaaggccgttgctccagggagaactgcaaatatcttcatccacccccacatttaaaaacgcagttggagataaatggacgcaataacttgattcagcagaagaacatggccatgttggcccagcaaatgcaactagccaatgccatgatgcctggtgccccattacaacccgtgccaatgttttcagttgcaccaagcttagccaccaatgcatcagcagccgcctttaatccctatctgggacctgtttctccaagcctggtcccggcagagatcttgccgactgcaccaatgttggttacagggaatccgggtgtccctgtacctgcagctgctgcagctgctgcacagaaattaatgcgaacagacagacttgaggtatgtcgagagtaccaacgtggcaattgcaaccgaggagaaaatgattgtcggtttgctcatcctgctgacagcacaatgattgacaccaatgacaacacagtcactgtgtgtatggattacatcaaagggagatgctctcgggaaaagtgcaaatactttcatccccctgcacatttgcaagccaagatcaaggctgcccaataccaggtcaaccaggctgcagctgcacaggctgcagccaccgcagctgccatgggaattcctcaagctgtacttcccccattaccaaagaggcctgctcttgaaaaaaccaacggtgccaccgcagtctttaacactggtattttccaataccaacaggctctagccaacatgcagttacaacagcatacagcatttctcccaccagttcccatggtgcacggtgctacgccagccactgtgtccgcagcaacaacatctgccacaagtgttcccttcgctgcaacagccacagccaaccagatacccataatatctgccgaacatctgactagccacaagtatgttacccagatgtagaattttcatcactaaacaatcatgctaaagaggaaaggacagtgtgcttggttagagtaaaggacgaggtcattagccatattgtatatatcgtcaagcaacacacacaaaagttcctcagccacaagacatccacatattgcatgttaaccagaagaaaagacaacattttccggaaatccactgcacactgttgcctatacactttgtacatttaattgatatttgtgctgaggtgatattcctgtctaaaagaacaacattgtctttcttttctagcacagagttatgcattcaaagatgcatacctagttagtttcctatatattcatgccatcttgaaaagacagactatggtgtaaccatgattctattatgtattggtacgtctgtagaccaagatataattttttaaaaataagtttatttctttcaaggtttacaaataacaaaggtgcaccttgtatttaaaattgccattatagatgagagcgtgcatgcacagtcatttttgtttaagagtaatatttttaatgtaatagattgtaagacgtggtgagggagggatctgacagagatgaatgtgccaagcaaaaccacaactgtgtatattttaaagcacatcatggctttaagtaccatgttgttaaggattctcatgaagtgccatagactgtacatcaaattagagtattatttcttcagtgttattgttttcagagccacattttgttgcatatttgctagtactaatcagtcaaagggcaccattctttttttttttttttgaaaccaaagctgtctcagaaatggccaatttaactttacagtaacaatagacagcacaacacaaactctctcaatacagataaactcacacatactggagatatatatataatagatatatataaaattattttaatgcattgtagtgtaatatttatgcatactatactgtataacatgttattcaaaagggattgccatttctgagacacagtaacaaaaaaatgaggaaattattttgcttctatttatagcctctgtcaaaagtcaaaagactataaatgctttgcaaaaatggtttcacgtttgcttaaatgcttcatcacagtcacattcaaaatagtgactctaaacaaagaagaaagcagcactgtcatcagatgcatgataaaccaaaatatgaaaatgggaaatgtttaattaacctagtaattgggtgggttaagtacatgggtgaattttatatgtgatttttgttttgttttgttttgttcagattaactgcttatagccttagaaagccttttacaaaattaaaaaaaaaatagatgtgcattcagtttttaagaatggaatcatccaaaggaattcctttttttgaggtttggatgttgcagctagtaaaggatatttttgctctgttcagcagttctaaaaattgctgaagtaggggccaggtcactggtagttatagtatggaatgggagaagtgaaagttcagttatagaactttccatacttccaagtttactgcaagtttttatgcttgagagagatgctttctaatataagactgatgtgttgattttactgattgtactgtacatctattaaagccttagattattacattacgggttggaacccataccaatgtaatttcaatcgtgttaagaaagtaatggtgacttcacatgttattgtagttagttacattatagaatattacttatttttcttgttaaaatgtagtttttcatttcctacatttattagattttcattttctattaacaattgaataccatttcagtttatagacttgttttattagattttaccaatgaatttttcaaaatacaaaaaaaagtagtttttccttcataacatactcagttttgaattacatgtagtgtcacatgaatattcgtattgttaactaaatgatttatattttactgatttaatattacagtgtaagaatgtcagtcattgttagttcttgtctagttttcattaaaagaacaaagatcttttatatggatatcttataaatatataatcattgctaagtaagaagttaagttgttgctatcgcaacaatcctggcagacaattgagtaatattttgatgatttattttgtttgtaattagttattataagaagatctagatcctagatattagaataaaatttattttctactgtatccatttcaaatgttaaaatattgtttaatatttttgaaatccctgagtatcaggccttgttataaataagctgcataatcaataaatagaacaagggactttttgttgataatccaaatactcaaagtttacgtaatgaaaattatagcgtgtgtgcaaactcttgagggttgattatgctgcaatttagcatgttggaacgtctagggagaaggttgactttttgcacttctgtatatagtcaaaagagagaaacctgtataatagtaagatcttattttgaataaaaacgtctataattacaaggagttttgttaaggctaatacaatgacagactgagcaaaattgcttgcaaaagtggcacagagttagcactccataccccttcaaacatgttgctttgctttcttgtggacagcttgtagtttgccaggattttttcagctggaaagatacgccatcctttcaaaccctcatgactgacaaaaactccatggggccaaatctgcctgaagatcattaccaaaaatagcaggtacttctaccattaaggtgaaatcatggatcagatattccttacatttttcaaaactactgcatgtttaaaacttcaacaaaaaaagagagaaagaactatactaagaacatatattattcagatcagtttctgccaatttcagtggtttattgttcacaaaaaaatcttcaaaacaagtattgactttcacaaaatttaaatcataaacaggcaaaccaaacagcacactgtagctatagttgttatgtgattgttttttaattgctgtaggatcctgttctttcagcaggtgaaaaataaaacgcagttcaaatttcatggttttaattttcaactcagaagcactcaaaaatgcaaaatgtgataatgggcacttgtttaaaagaattagtgtatccagccttcactccagctggttaaaaatgttgcacttatcagcaaccctaccactttcatctgctgaaaggacaaatgtgcttggttttactattatgtaatcacaacttactttctgcttgtagttgcttaaaattatgtattttgtcttgggctgcaatttgttttatgcttattttattattactgcagtagttgactttgctgtatggaaaaataaagtgaaattgccctaataaaacttctctttcttaagt

SEQ ID NO: 294 - DNA, 1113 bp, Homo sapiens
atggctgttagtgtcacaccaattcgggacacaaaatggctaacactggaagtatgtagagagttccagagggggacttgctcacggccagacacggaatgtaaatttgcacatccttcgaaaagctgccaagttgaaaatggacgagtaatcgcctgctttgattcattgaaaggccgttgctccagggagaactgcaaatatcttcatccacccccacatttaaaaacgcagttggagataaatggacgcaataacttgattcagcagaagaacatggccatgttggcccagcaaatgcaactagccaatgccatgatgcctggtgccccattacaacccgtgccaatgttttcagttgcaccaagcttagccaccaatgcatcagcagccgcctttaatccctatctgggacctgtttctccaagcctggtcccggcagagatcttgccgactgcaccaatgttggttacagggaatccgggtgtccctgtacctgcagctgctgcagctgctgcacagaaattaatgcgaacagacagacttgaggtatgtcgagagtaccaacgtggcaattgcaaccgaggagaaaatgattgtcggtttgctcatcctgctgacagcacaatgattgacaccaatgacaacacagtcactgtgtgtatggattacatcaaagggagatgctctcgggaaaagtgcaaatactttcatccccctgcacatttgcaagccaagatcaaggctgcccaataccaggtcaaccaggctgcagctgcacaggctgcagccaccgcagctgccatgggaattcctcaagctgtacttcccccattaccaaagaggcctgctcttgaaaaaaccaacggtgccaccgcagtctttaacactggtattttccaataccaacaggctctagccaacatgcagttacaacagcatacagcatttctcccaccagttcccatggtgcacggtgctacgccagccactgtgtccgcagcaacaacatctgccacaagtgttcccttcgctgcaacagccacagccaaccagatacccataatatctgccgaacatctgactagccacaagtatgttacccagatgtag
